(19) United States
(12) Patent Application Publication
(10) Pub. No.: US 2024/0317859 A1
(43) Pub. Date: Sep. 26, 2024

(54) ANTI-HUMAN PD-1 AGONIST ANTIBODY AND PHARMACEUTICAL COMPOSITION COMPRISING THE ANTIBODY FOR TREATING OR PREVENTING INFLAMMATORY DISEASES

(71) Applicants: FOUNDATION FOR BIOMEDICAL RESEARCH AND INNOVATION AT KOBE, Kobe-shi, Hyogo (JP); NATIONAL INSTITUTES OF BIOMEDICAL INNOVATION, HEALTH AND NUTRITION, Ibaraki-shi, Osaka (JP); MEIJI SEIKA PHARMA CO., LTD., Tokyo (JP)

(72) Inventors: Tasuku HONJO, Kobe-shi, Hyogo (JP); Akio OHTA, Kobe-shi, Hyogo (JP); Masaki TAJIMA, Kobe-shi, Hyogo (JP); Haruhiko KAMADA, Ibaraki-shi, Osaka (JP); Satoshi NAGATA, Ibaraki-shi, Osaka (JP); Kensuke SUZUKI, Tokyo (JP); Takayoshi FUKUSHIMA, Odawara-shi, Kanagawa (JP); Yosuke TOKUMARU, Tokyo (JP)

(73) Assignees: FOUNDATION FOR BIOMEDICAL RESEARCH AND INNOVATION AT KOBE, Kobe-shi, Hyogo (JP); NATIONAL INSTITUTES OF BIOMEDICAL INNOVATION, HEALTH AND NUTRITION, Ibaraki-shi, Osaka (JP); MEIJI SEIKA PHARMA CO., LTD., Tokyo (JP)

(21) Appl. No.: 18/290,006

(22) PCT Filed: May 12, 2022
(86) PCT No.: PCT/JP2022/020011

§ 371 Date: Nov. 8, 2023

(30) Foreign Application Priority Data
May 13, 2021 (JP) 2021-081913
May 21, 2021 (JP) 2021-086534

(51) Int. Cl. C07K 16/28

(52) U.S. Cl. CPC C07K 16/2818; C07K 2317/21; C07K 2317/24; C07K 2317/52

(57) ABSTRACT

Conditions necessary for antibodies to human PD-1 to have agonist activity are searched and an optimized agonist antibody is provided based on the conditions and used as a therapeutic for human inflammatory diseases. An agonist antibody to human PD-1 or a functional fragment thereof, wherein the antibody or a functional fragment thereof binds to domain #7 of human PD-1 as shown in SEQ ID NO: 9 is provided.

### TECHNICAL FIELD

[0001] The present invention relates to a PD-1 agonist and a pharmaceutical composition comprising a PD-1 agonist for treating or preventing inflammatory diseases.

### BACKGROUND ART

[0002] The immune response has an aspect that its inappropriate regulation could lead to diseases. An insufficient immune response to pathogens such as bacteria or viruses that have invaded the organism results in infectious diseases. Conversely, if adverse immune response to self-tissues occurs, autoimmune diseases develop. To prevent from falling into such pathological conditions and to utilize the system effectively, the immune system is provided with both mechanisms activating the function of immune cells to promote immune response and mechanisms suppressing immune cells to reduce immune response. Disruption of these endogenous regulatory mechanisms is considered to contribute to diseases resulting from insufficient or excessive immune response.

[0003] The best example demonstrating the importance of endogenous immunoregulation can be found in cancer immunotherapy that has rapidly become a reality in recent years. The molecules such as CTLA-4 and PD-1 appearing in this novel therapy, which is clearly distinct from conventional “immunotherapy”, are a type of endogenous immunosuppressive mechanisms also called immune checkpoints, and have a particularly remarkable impact among the same type of immunosuppressive mechanisms. The pathology of cancer can be regarded as a condition where cancer cells that should have been eliminated have proliferated because of insufficient immune response thereto. The cause of this insufficient immune response is related to the fact that the inside of cancer tissues is filled with various types of immunosuppressive mechanisms. This means that cancer tissues evade attacks from immune cells by actively using the immunosuppressive mechanisms intrinsic to the organism. By blocking CTLA-4 or PD-1, representative immunosuppressive mechanisms, the inhibition of anti-tumor immunity is reversed and the resulting immune activation brings about actual therapeutic effects. The fact shows that the above-mentioned endogenous immunosuppressive mechanisms have highly significant effects and can be important targets for the treatment of diseases by correcting the imbalance in immune response.

[0004] The critical importance of endogenous immunosuppressive mechanisms is also shown by the fact that the absence of any one of these mechanisms can cause much exaggerated inflammatory responses. For example, PD-1-deficient mice have been shown to spontaneously develop various inflammatory (Non-Patent Document No. 1: Okazaki et al. Nat. Immunol., 2013). Inflammatory adverse response resulting from excessive immune response is observed at a certain proportion of cancer patients undergoing immunotherapy with PD-1 inhibitors (Non-Patent Document No. 2: Young et al. Cancer Immunol. Res., 2018). These facts indicate that the immunosuppressive mechanisms that are actively utilized in cancer tissues are essentially physiological feedback mechanisms to protect healthy tissues in the body from excessive inflammatory responses. Importantly, the clinical efficacy of pharmaceutical drugs such as anti-PD-1 antibody in cancer therapy suggests that it is possible to modulate the intensity of immune response by regulating the function of PD-1.

### PRIOR ART LITERATURE

### Non-Patent Documents

[0005] Non-Patent Document No. 1: Okazaki T, Chikuma S, Iwai Y, Fagarasan S, Honjo T. A rheostat for immune responses: the unique properties of PD-1 and their advantages for clinical application. Nat. Immunol. 14:1212-1218 (2013).
[0006] Non-Patent Document No 2: Young A, Quandt Z, Bluestone J A. The Balancing Act between Cancer Immunity and Autoimmunity in Response to Immunotherapy. Cancer Immunol. Res. 6:1445-1452 (2018).

### DISCLOSURE OF THE INVENTION

### Problem for Solution by the Invention

[0007] As shown in the above-described background, drugs that inhibit immunosuppressive mechanisms were used in cancer therapy where the enhancement of immune response was desirable. However, to suppress overwhelming immune response in inflammatory diseases, the treatment demands an opposite approach that actively stimulates the immunosuppressive mechanisms. PD-1 is expressed on immune cells such as activated T cells and interact with ligand molecules such as PD-L1 and PD-L2 on the surface of the other cell. Upon antigen recognition, PD-1 stimulation with these ligand molecules interferes with the activating signal of the immune cells. Since PD-1 itself can initiate the immunosuppressive signaling, artificial stimulation of PD-1 might lead to the treatment of inflammatory diseases. While anti-PD-1 antibodies used in cancer therapy (eventually) enhance immune function by blocking PD-1 interaction with its ligand molecule, PD-1 agonists capable of inducing the function of PD-1 by binding to PD-1 are highly promising as drugs for positive immunosuppression.

[0008] The present invention aims at searching for conditions necessary for anti-human PD-1 antibody to have agonistic activity, establishing agonist antibody optimized based on such necessary conditions, and applying the agonist antibody as a therapeutic agent for human inflammatory diseases.

### Means to Solve the Problem

[0009] There are a number of inflammatory diseases caused by excessive immune response, and a novel and more effective treatment is demanded in many cases. Targeting an immune regulatory molecule PD-1, the present inventors have found a large number of anti-human PD-1 antibodies, which induce the immunosuppressive activity of PD-1 and are potentially capable of preventing or treating inflammatory diseases in human with the agonistic activity. The present inventors have examined binding domains of these antibodies bind to human PD-1 and found that the biological activity of these antibodies varies depending on the binding domain. Furthermore, the present inventors have found that binding to Fc receptors is necessary for anti-PD-1 antibodies to exert their agonistic activity and that an enhanced affinity to Fc receptors is necessary for immunosuppression in humans. In addition, the present inventors have found that the addition of ADCC-inducing capability to anti-PD-1 agonist antibodies enables depletion of PD-1-expressing activated immune cells, further improving desirable immunosuppressive activity.

[0010] The present invention has been achieved based on these findings, and a summary thereof is described as below.

(1) An agonist antibody to human PD-1 or a functional fragment thereof, wherein the antibody or a functional fragment thereof binds to domain #7 as shown in SEQ ID NO: 9, of human PD-1.
(2) The antibody or a functional fragment thereof of (1), wherein the antibody or a functional fragment thereof has any one of (A) to (D) below:
[0011] (A) an antibody heavy chain variable region sequence comprising CDR1, CDR2 and CDR3 in the amino acid sequence as shown in SEQ ID NO: 17 and an antibody light chain variable region sequence comprising CDR1, CDR2 and CDR3 in the amino acid sequence as shown in SEQ ID NO: 34;
[0012] (B) an antibody heavy chain variable region sequence comprising CDR1, CDR2 and CDR3 in the amino acid sequence as shown in SEQ ID NO: 22 and an antibody light chain variable region sequence comprising CDR1, CDR2 and CDR3 in the amino acid sequence as shown in SEQ ID NO: 38;
[0013] (C) an antibody heavy chain variable region sequence comprising CDR1, CDR2 and CDR3 in the amino acid sequence as shown in SEQ ID NO: 28 and an antibody light chain variable region sequence comprising CDR1, CDR2 and CDR3 in the amino acid sequence as shown in SEQ ID NO: 42; or
[0014] (D) an antibody heavy chain variable region sequence comprising CDR1, CDR2 and CDR3 in the amino acid sequence as shown in SEQ ID NO: 33 and an antibody light chain variable region sequence comprising CDR1, CDR2 and CDR3 in the amino acid sequence as shown in SEQ ID NO: 46.
   (3) The antibody or a functional fragment thereof of (1), wherein the antibody or a functional fragment thereof has either the following (A) to (D) below:
[0015] (A) an antibody heavy chain variable region comprising complementarity determining region (CDR) 1 of SEQ ID NO: 345, CDR2 of SEQ ID NO: 346 and CDR3 of SEQ ID NO: 347, as well as an antibody light chain variable region comprising CDR1 of SEQ ID NO: 348, CDR2 of SEQ ID NO: 349 and CDR3 of SEQ ID NO: 350;
[0016] (B) an antibody heavy chain variable region comprising CDR1 of SEQ ID NO: 351, CDR2 of SEQ ID NO: 352 and CDR3 of SEQ ID NO: 353, as well as an antibody light chain variable region comprising CDR1 of SEQ ID NO: 354, CDR2 of SEQ ID NO: 355 and CDR3 of SEQ ID NO: 356;
[0017] (C) an antibody heavy chain variable region comprising CDR1 of SEQ ID NO: 357, CDR2 of SEQ ID NO: 358 and CDR3 of SEQ ID NO: 359, as well as an antibody light chain variable region comprising CDR1 of SEQ ID NO: 360, CDR2 of SEQ ID NO: 361 and CDR3 of SEQ ID NO: 362; or
[0018] (D) an antibody heavy chain variable region comprising CDR1 of SEQ ID NO: 363, CDR2 of SEQ ID NO: 364 and CDR3 of SEQ ID NO: 365, as well as an antibody light chain variable region comprising CDR1 of SEQ ID NO: 366, CDR2 of SEQ ID NO: 367 and CDR3 of SEQ ID NO: 368.
   (4) The antibody or a functional fragment thereof of any one of (1) to (3), wherein the antibody variable region comprises the framework of human antibody or the framework of humanized antibody.
   (5) The antibody or a functional fragment thereof of (1), wherein the antibody or a functional fragment thereof has either the following (A) to (D) below:
[0019] (A) an antibody heavy chain variable region having the amino acid sequence as shown in SEQ ID NO: 20 and a light chain variable region having the amino acid sequence as shown in SEQ ID NO: 37;
[0020] (B) an antibody heavy chain variable region having the amino acid sequence as shown in SEQ ID NO: 21 and a light chain variable region having the amino acid sequence as shown in SEQ ID NO: 37;
[0021] (C) an antibody heavy chain variable region having the amino acid sequence as shown in SEQ ID NO: 26 and a light chain variable region having the amino acid sequence as shown in SEQ ID NO: 40; or
[0022] (D) an antibody heavy chain variable region having the amino acid sequence as shown in SEQ ID NO: 30 and a light chain variable region having the amino acid sequence as shown in SEQ ID NO: 44.
   (6) The antibody or a functional fragment thereof of any one of (1) to (5), wherein the antibody heavy chain constant region and the antibody light chain constant region comprise an amino acid sequence derived from human antibody.
   (7) The antibody or a functional fragment thereof of any one of (1) to (5), wherein the antibody heavy chain constant region is the antibody heavy chain constant region of human IgG.
   (8) The antibody or a functional fragment thereof of (7), wherein the antibody heavy chain constant region of said human IgG is the antibody heavy chain constant region of human IgG1.
   (9) The antibody or a functional fragment thereof of any one of (1) to (8), wherein the antibody light chain constant region is the antibody light chain constant region of human Igκ.
   (10) The antibody or a functional fragment thereof of any one of (1) to (9), wherein the antibody or a functional fragment thereof has an improved affinity to any one or more of the following receptors: human FcγRIIA, human FcγRIIB or human FcγRIIA.
   (11) The antibody or a functional fragment thereof of any one of (1) to (9), wherein the antibody or a functional fragment thereof has an improved affinity to human FcγRIIB.
   (12) The antibody or a functional fragment thereof of any one of (1) to (9) or (11), wherein the antibody or a functional fragment thereof has an improved affinity to human FcγRIIIA.
   (13) The antibody or a functional fragment thereof of (11) or (12), wherein the improvement of affinity to human FcγRIIB is, compared to a reference antibody having the Fc region of human IgG1-K322A, by 1.5 folds or more, preferably by 2.0 folds or more, and still more preferably by 2.5 folds or more, in a test measuring Fc receptor binding affinity using the surface plasmon resonance technique.
   (14) The antibody or a functional fragment thereof of any one of (11) to (13), wherein the improvement of affinity to human FcγRIIB is, compared to a reference antibody having the Fc region of human IgG1-K322A, by 2 folds or more, preferably by 5 folds or more, and still more preferably by 20 folds or more, in a test of measuring the affinity to a human Fc receptor-expressing cell line with a flow cytometer.
   (15) The antibody or a functional fragment thereof of (12) or (13), wherein the improvement of affinity to human FcγRIIIA is, compared to a reference antibody having the Fc region of human IgG1-K322A, by 1.5 folds or more, preferably by 2.0 folds or more, and still more preferably by 2.5 folds or more, in a test measuring Fc receptor binding affinity using the surface plasmon resonance technique.
   (16) The antibody or a functional fragment thereof of any one of (12) to (15), wherein the improvement of affinity to human FcγRIIIA is, compared to a reference antibody having the Fc region of human IgG1-K322A, by 1.5 folds or more, preferably by 2.0 folds or more, still more preferably by 4.0 folds or more, and most preferably by 5.0 folds or more, in a test of measuring the affinity to a human Fc receptor-expressing cell line with a flow cytometer.
   (17) The antibody or a functional fragment thereof of any one of (10) to (16), wherein the antibody or a functional fragment has a modified Fc region of human IgG, and the affinity of the antibody or a functional fragment thereof to said receptor has been improved by modification of the Fc region of human IgG.
   (18) The antibody or a functional fragment thereof of any one of (10) to (16), wherein the antibody or a functional fragment has a modified Fc region of human IgG1 or human IgG4, and the affinity of the antibody or a functional fragment thereof to said receptor has been improved by modification of the Fc region of human IgG1 or human IgG4.
   (19) The antibody or a functional fragment thereof of any one of (10) to (18), wherein any of the amino acids at positions 233, 234, 236, 237, 238, 239, 267, 268, 271, 296, 323, 326, 328, 330 and 332 (according to EU numbering) in the amino acid sequence of the Fc region of human IgG1 is modified.
   (20) The antibody or a functional fragment thereof of (19), wherein the modification of amino acids is any one of the combinations G236D/H268D, S239D/H268D, S239D/H268D/L328Y/I332E, G236D/H268D/K322A, S239D/H268D/K322A, S239D/S267G/H268D/K322A, G236D/H268D/E293A/K322A, S239D/H268D/K322A/L328Y/I332E, S239D/H268D/E293A/K322A. S239D/S267G/H268D/K322A/L328Y, S239D/S267G/H268D/K322A/I332E, S239D/H268D/K322A/L328Y, S239D/H268D/K322A/I332E, S239D/S267G/H268D/K322A/L328Y/I332E, E233D/G237D/P238D/H268D/P271G/A330R and S267E/L328F.
   (21) The antibody or a functional fragment thereof of any one of (10) to (18), wherein any of the amino acids at positions 236, 239, 268, 328 and 332 (according to EU numbering) in the amino acid sequence of the Fc region of human IgG4 is modified.
   (22) The antibody or a functional fragment thereof of (21), wherein the modification of amino acids is any one of the combinations S228P/G236D/Q268D, S228P/S239D/Q268D, and S228P/S239D/Q268D/L328Y/I332E.
   (23) The antibody or a functional fragment thereof of (10), wherein the antibody comprises either the following (A) to (D) below:
[0023] (A) an antibody heavy chain sequence having the amino acid sequence as shown in SEQ ID NO: 245 and an antibody light chain sequence having the amino acid sequence as shown in SEQ ID NO:247;
[0024] (B) an antibody heavy chain sequence having the amino acid sequence as shown in SEQ ID NO: 277 and an antibody light chain sequence having the amino acid sequence as shown in SEQ ID NO: 279;
[0025] (C) an antibody heavy chain sequence having the amino acid sequence as shown in SEQ ID NO: 285 and an antibody light chain sequence having the amino acid sequence as shown in SEQ ID NO: 287; or
[0026] (D) an antibody heavy chain sequence having the amino acid sequence as shown in SEQ ID NO: 289 and an antibody light chain sequence having the amino acid sequence as shown in SEQ ID NO: 291.
   (24) The antibody or a functional fragment thereof of any one of (12) to (23), wherein the antibody or a functional fragment thereof is defucosylated.
   (25) An isolated nucleic acid molecule encoding the antibody or a functional fragment thereof of any one of (1) to (24).
   (26) A vector comprising the nucleic acid molecule of (25).
   (27) A host cell comprising the nucleic acid molecule of (25).
   (28) A host cell comprising the vector of (26).
   (29) A method of producing an antibody or a functional fragment thereof, comprising a step of culturing the host cell of (27) or (28).
   (30) A pharmaceutical composition comprising the antibody or a functional fragment thereof of any one of (1) to (24) and a pharmaceutically acceptable carrier.

### Effect of the Invention

[0027] The present invention makes it possible to treat or prevent inflammatory diseases.

[0028] The present specification encompasses the contents disclosed in the specification and/or the drawings of Japanese Patent Application Nos. 2021-81913 and 2021-86534 based on which the present patent application claims priority.

### BRIEF DESCRIPTION OF DRAWINGS

[0029] FIG. 1 Evaluation system for suppressive activity against cytokine production from T cell by PD-1 stimulation. (A) Schematic diagram of evaluation system using DO11.10 T cell hybridomas rendered to express human PD-1 (hPD-1) and IIA1.6 B cell lymphoma cells. DO11.10 T cell hybridomas are activated in response to OVA₃₂₃₋₃₃₉ peptide presented by MHC class II molecule (I-A^{d}) of IIA1.6 cells, but the activation is suppressed when stimulation to PD-1 occurs. (B) When interaction with PD-L1 on IIA1.6 cells occurs, IL-2 production from the human PD-1 expressing DO11.10 T cell hybridomas is suppressed. In the case where PD-1 or PD-L1 is not expressed, suppression of IL-2 is not observed. (C) When EH12.2H7, a blocking antibody to human PD-1, is added to the evaluation system, suppressive effect by PD-L1 is cancelled. With this evaluation system, detection of PD-1-dependent immune regulatory activity is possible.

[0030] FIG. 2 Sequences of human and mouse PD-1, and schematic diagram showing domains of PD-1 for examining the binding characteristics of a group of novel anti-human PD-1 antibodies. (A) Domains indicated by numbers 1 to 8 are representative domains constituting the surface of human PD-1 molecule. PD-1 sequences were prepared by replacing one of these domains with the corresponding amino acid sequence of mouse PD-1. When anti-human PD-1 antibody showed a decrease in binding capacity, the relevant domain was defined as a domain to which the antibody binds. Further, antibody binding was also examined on point mutants of human PD-1 in which only one amino acid residue was mutated and on mouse PD-1 only a part of which was replaced with the corresponding amino acid sequence of human PD-1. (B) Sequence comparison between human PD-1 and mouse PD-1. The framed parts represent domains No. 1 to No. 8 as shown in FIG. 2A.

[0031] FIG. 3 Evaluation of agonistic activity of anti-human PD-1 antibody. (A) Schematic diagram of an evaluation system combining DO11.10 T cell hybridomas rendered to express human PD-1, and IIA1.6 B cell lymphoma cells rendered to express not PD-L1 but mouse FcγRIIB. Screening of anti-human PD-1 antibodies was performed using IL-2 production suppressive activity as an indicator.

(B) As a result of evaluation, about 30 clones having an immunosuppressive activity were obtained, including those with high activity and those with low activity. Among these anti-human PD-1 antibodies, only the clones having an immunosuppressive activity are shown in the graph.

[0032] FIG. 4 Comparison between the activities of anti-human PD-1 agonist antibodies. Among the anti-human PD-1 antibodies found to have an immunosuppressive activity; those having relatively high activity were selected and IC50 was determined. Representative antibodies from each of the following groups are shown: (A) #6,7 group (antibody group that binds to domains #6 and #7), (B) #7 group (antibody group that binds only to domain #7) and (C) #6,8 group (antibody group that binds to domains 6 and 8). (D) IC50 values of the antibodies shown in (A) to (C). Not only the novel antibodies prepared by immunizing mice with human PD-1, but also commercially available antibodies (J116, MIH4) which were found to have agonistic activity are all mouse IgG. Based on the suppression curve of IL-2 production in a concentration-dependent manner by these antibodies, the concentration at which 50% suppression was reached was determined, taking the state of no IL-2 production as 0%.

[0033] FIG. 5AB Correlation between the activity of anti-human PD-1 antibody and binding site. (A) Antibodies having agonistic activity exhibit a characteristic of binding to domains #6 and #8, domains #6 and #7 or domain #7. This characteristic is completely different from that of antibodies exhibiting blocking activity. In the #6,7 group, all antibodies exhibit agonistic activity regardless of the difference in binding to domain #1. (B) A model showing the extracellular domain of human PD-1 molecule. In the model, human PD-1 molecule is connected to the transmembrane domain at the upper end. Domains #6, #7 and #8, which are the binding sites of anti-human PD-1 agonist antibodies, exist at the membrane-proximal part of human PD-1. On the other hand, sites associated with the binding of anti-PD-1 blocking antibodies are localized at the membrane-distal position. It is estimated that amino acid residue Arg143 is located in a part sandwiched between domain #6 and domain #7.

[0034] FIG. 5CD Correlation between the activity of anti-human PD-1 antibody and binding site. (C) Analysis example of binding characteristics. To determine the binding capacities of anti-human PD-1 antibodies, their binding to PD-1 molecules (wild-type or point-mutant of human PD-1 and substituted mouse PD-1) which were forcibly expressed in cells was evaluated by flow cytometry using a fluorescein-labeled anti-IgG antibody. The vertical axis represents the fluorescence intensity of GFP co-expressed with PD-1, which is proportional to the expression level of PD-1. The horizontal axis represents the amount of bound anti-human PD-1 antibody. The results are shown for the cases of using cells that expressed the following PD-1 proteins: (from the top) wild-type human PD-1, R143A point mutant of human PD-1, and domain #7 substituted mouse PD-1 (domain #7 of mouse PD-1 was replaced with the amino acid sequence of domain #7 of human PD-1; designated “Mouse PD-1 (hu38-48)” in the Figure). HM268, one of the newly obtained anti-human PD-1 antibodies, bound to both wild-type human PD-1 and R143A point mutant by almost equal degrees, while the binding of a known antibody 949 to R143A point mutant showed an extremely decrease. (D) Anti-human PD-1 antibodies were classified based on the difference in their binding domains on human PD-1. As a result, a group of novel anti-human PD-1 antibodies were obtained whose binding domains are different from those of a group of known antibodies including PD-1 blocking antibody such as Nivolumab. This novel antibody group is classified in those antibodies which do not bind to PD-1 if domain #7 is replaced and those antibodies which do not bind to PD-1 if either domain #7 or domain #6 is replaced. These two types are distinguished from each other as antibody group in which domain #7 is important for binding (#7 only/#7 group) and antibody group in which both domain #6 and domain #7 are important for binding (#6 and 7/#6,7 group). In #7 only group, known antibodies such as 949 and J116 are included. However, while the antibodies of the present invention retained binding capacity to human PD-1 Arg143 point mutants like R143A and R143V as well as mouse PD-1 with domain #7 being substituted by human domain #7, known antibodies showed a remarkable decrease in binding capacity to these point mutants and substituted PD-1. Further, #6 and 7 group encompassed those antibodies which do not bind to PD-1 when domain #1 is replaced (HM292, HM297, HM330 and HM624); those antibodies whose binding decreases when domain #1 is replaced (HM698, HM634 and HM643); or those which retain binding to PD-1 even when domain #1 is replaced (HM647 and HM654). These sub-groups of antibodies are characterized by a common nature that they bind to domain #6 and domain #7, and are distinguished from known antibodies. These results show that the novel anti-human PD-1 antibodies of the present invention have a binding pattern different from those of known antibodies.

[0035] FIG. 6 Induction of allergic asthma in mouse and anti-inflammatory action of anti-human PD-1 agonist antibody. (A) A diagram showing a method of induction of allergic asthma and a schedule of antibody administration. Allergic asthma was induced by sensitizing human PD-1 knock-in mice with house dust mite antigen (HDM) and nasally administrating the same antigen from one week later. Seven days after the start of daily HDM nasal administration, infiltration of inflammatory cells into the alveoli was examined by collecting bronchoalveolar lavage fluid. (B-D) Induction of allergic asthma increased the total number of infiltrated inflammatory cells (B), most of which were eosinophils (C) and CD4⁺ T cells (D). However, preventive administration of anti-human PD-1 agonist antibody to this inflammation model inhibited the infiltration of eosinophils and CD4⁺ T cells into the alveoli. Further, even in the case where HM266 was administered only once (HM266 (×1)) 3 days after the induction of inflammation in the lung tissue in order to observe the therapeutic effect, the infiltration of inflammatory cells into the alveoli was suppressed.

[0036] FIG. 7 Anti-inflammatory action of anti-human PD-1 agonist antibody against allergic asthma and suppression of Th2 type immune response. Allergic asthma was induced according to the same schedule as in FIG. 6, and bronchoalveolar lavage fluid and lung tissue were collected. Cytokine production in CD4⁺ cells infiltrating into the alveoli (A) or lung tissue (B) was examined by intracellular staining. As a result, a decrease in IL-4, IL-5, IL-10 and IL-13 producing cells was observed in the group receiving HM266 four times (HM266 (×4)). Further, blood concentration of IgE specific to house dust mite antigen (C) was also significantly decreased by administration of HM266. A similar tendency was also observed when HM266 was administered only once (HM266 (×1)) 3 days after the start of inflammation induction in the lung, suggesting that anti-human PD-1 agonist antibody is useful for treatment of allergic diseases.

[0037] FIG. 8 Induction of experimental encephalomyelitis (EAE) in mouse and anti-inflammatory action of anti-human PD-1 agonist antibody. Spleens and lymph nodes were collected from wild-type mice 13 days after immunization with myelin oligodendrocyte glycoprotein (MOG)-derived peptide 35-55 (MOG₃₅₋₅₅ peptide) to thereby obtain CD4⁺ T cell fraction. These CD4⁺ T cells were cultured in the presence of MOG₃₅₋₅₅ peptide and IL-23, and at the same time, human PD-1 was overexpressed using a retroviral vector. After culturing for 5 days, cells were harvested and transferred into new wild-type mice to induce EAE. About 1 week after cell transfer, mice developed EAE and the EAE score increased. However, preventive administration of HM266 to this model showed a significant improvement in symptoms. These results suggested that anti-human PD-1 agonist antibody is useful for treatment of autoimmune diseases.

[0038] FIG. 9 Induction of colitis in mouse and anti-inflammatory action of anti-human PD-1 agonist antibody. T cell-dependent colitis was induced by transferring human PD-1 knock-in mouse-derived CD25⁻CD4⁺ T cells into RAG2 knock-out mice. (A) Although a remarkable weight loss was observed from 4 weeks after cell transfer, administration of HM266 significantly improved the weight loss. (B-D) Analysis of the colon collected 8 weeks after cell transfer showed a decrease in colon length and a significant reduction of IFN-γ or IL-17 positive ratio in CD4⁺ T cells infiltrating the lamina propria, as compared to a control. These results suggested the applicability of anti-human PD-1 agonist antibody to a treatment of inflammatory bowel diseases.

[0039] FIG. 10AB Induction of acute Graft-Versus-Host Disease (GVHD) in mouse and anti-inflammatory action of anti-human PD-1 agonist antibody. Splenocytes derived from C57BL/6 human PD-1 knock-in mice (donor) were transferred into BDF1 mice (recipient) to thereby induce acute GVHD. Induction of GVHD led to weight loss, increase of donor cells in peripheral blood, and induction of PD-1 on donor T cells. When HM266, HM242, HM297 and HM268 were respectively administered to this inflammation model in a preventive manner, weight loss and donor cell increase were remarkably suppressed.

[0040] FIG. 10CDEF Induction of acute GVHD in mouse and anti-inflammatory action of anti-human PD-1 agonist antibody. Splenocytes derived from C57BL/6 human PD-1 knock-in mice (donor) were transferred into BDF1 mice (recipient) to thereby induce acute GVHD. When HM266, HM242, HM297 and HM268 were respectively administered to this inflammation model in a preventive manner, donor cell ratios (C-D) and donor-derived CD8⁺ cell ratios (E-F) in the spleen and the liver 2 weeks after induction were significantly suppressed. These results suggested the applicability of anti-human PD-1 agonist antibody to a treatment of inflammatory diseases.

[0041] FIG. 11ABCD Induction of chronic GVHD/lupus-like symptoms in mouse and anti-inflammatory action of anti-human PD-1 agonist antibody. Splenocytes derived from C57BL/6 human PD-1 knock-in mice (donor) were freed of CD8⁺ cells and thereafter transferred into BDF1 mice (recipient) to thereby induce chronic GVHD/lupus-like symptoms. After the cell transfer, donor-derived Tfh cells (A), recipient-derived germinal center B cells (B), class switched B cells (C) and plasma cells (D) in the recipient's spleen were confirmed to increase remarkably. Prophylactic administration of HM266 to this inflammation model suppressed these increases. Mark “-” represents recipient mice into which no donor cells were transferred.

[0042] FIG. 11E Induction of chronic GVHD/lupus-like symptoms in mouse and anti-inflammatory action of anti-human PD-1 agonist antibody. Splenocytes derived from C57BL/6 human PD-1 knock-in mice (donor) were freed of CD8⁺ cells and thereafter transferred into BDF1 mice (recipient) to thereby induce chronic GVHD/lupus-like symptoms. After the cell transfer, anti-dsDNA antibody was confirmed to increase remarkably in blood. When HM266 was administered to this inflammation model in a preventive manner, the increase in blood anti-dsDNA antibody was suppressed. These results suggested the applicability of anti-human PD-1 agonist antibody to a treatment of inflammatory diseases that involve a production of autoantibody.

[0043] FIG. 12 Chimerization of anti-human PD-1 agonist antibody with human Fc region and its biological activity/property profile test. From the anti-human PD-1 agonist antibodies obtained, those with high activity were selected. Then, a chimeric antibody having mouse-derived Fab region and the Fc region of human IgG1-K322A (human Fc chimeric antibody) was prepared. (A) Since the human Fc region was used, a human FcγRIIB-expressing cell line was used to evaluate the agonistic activity. (B) Evaluation of the agonistic activity and property of the human Fc chimeric antibody. In the column described “SDS-PAGE”, mark “-” represents antibodies in which no abnormal bands were detected, and mark “X” represents antibodies in which abnormal bands such as dimers of heavy chain alone were detected. Differences were seen between the clones tested; especially HM242, HM268 and HM297 showed a high agonistic activity and a good property profile.

[0044] FIG. 13 Humanization of anti-human PD-1 agonist antibody and its biological activity/property profile test. Agonistic activities of humanized (A) HM242, (B) HM297 and (C) HM268 are shown. Their property profiles are shown in Tables 1 to 3. Further, in Tables 1 to 3, “% Identical with human sequence” (=humanization ratio) means homology (%) in comparison between the sequence of antibody excluding CDRs and the sequence of antibody derived from human germline. While some antibodies showed a decrease in agonistic activity and stability as a result of humanization, a plurality of antibodies (HM242-C3, HM242-D3, HM297-H5 and HM268-K8) were obtained which retained a high agonistic activity and showed a good property profile.

[0045] FIG. 14 Action of humanized anti-human PD-1 agonist antibody in an evaluation system using human primary cultured cells. The present inventors examined whether the humanized anti-PD-1 agonist antibody having humanized Fab region and the Fc region of human IgG1-K322A would exhibit a T cell-suppressive action in an evaluation system solely composed of human primary cultured cells. Induction of PD-1 expression in CD4⁺ T cells was confirmed by a mixed lymphocyte reaction (MLR) using CD4⁺ T cells derived from human peripheral blood mononuclear cells (PBMC) and CD19⁺ B cells derived from a different donor (data not shown). When those T cells were to be stimulated again with B cells, the above-mentioned humanized anti-human PD-1 agonist antibody or CTLA-4-Ig (positive control) was added. After 12 hours, T cell-suppressive activity was evaluated using IFN-γ production in the supernatant as an indicator. As a result, inhibition of IFN-γ production was seen in CTLA-4-Ig but no remarkable inhibition was seen in the humanized anti-human PD-1 agonist antibody.

[0046] FIG. 15 Exertion of the agonistic activity of anti-human PD-1 agonist antibody depends on Fc receptors, especially on FcγRIIB. The IL-2 production suppressive activity of the humanized anti-human PD-1 agonist antibody was examined with the same evaluation system as shown in FIGS. 3 and 12. The IIA1.6 cells used here express human FcγRIA, FcγRIIA (H131), FcγRIIA (R131), FcγRIIB, FcγRIIIA (F158) or FcγRIIIA (V158) individually at similar high levels. When human FcγRIIB, FcγRIIA (H131), FcγRIIA (R131), FcγRIIIA (F158) or FcγRIIIA (V158)-expressing cells were used, IL-2 production was suppressed by humanized anti-human PD-1 agonist antibody. In particular, the highest IL-2 production suppressive activity was exhibited when FcγRIIB-expressing cells were used. When FcγRIA-expressing cells were used, IL-2 production increased rather than decreased by the addition of the antibody. These results suggest that humanized anti-human PD-1 agonist antibody exerts the highest agonist activity in the presence of FcγRIIB in particular.

[0047] FIG. 16 Exertion of the agonistic activity of anti-human PD-1 antibody depends on the expression level of Fc receptors. In the evaluation system shown in FIG. 3, (A) when IIA1.6 cells not expressing Fc receptors were used, humanized anti-human PD-1 antibody did not show agonistic activity. (B,C) On the other hand, when IIA1.6 cells rendered to express FcγRIIB were used, humanized anti-human PD-1 antibody showed agonistic activity and the activity depended on the expression level of FcγRIIB. (D) In FcγRIIB high expression cells and FcγRIIB low expression cells, expression levels of FcγRIIB were measured by FACS. The results revealed that there was approximately a 6-fold difference in geometric mean fluorescence intensity (GMFI).

[0048] FIG. 17A Improvement of affinity to human FcγRIIB by modification of Fc region. (A) Affinity of Fc region-modified antibody to human FcγRIIB (K_{D} value). The affinity of human IgG1 Fc region-modified antibodies X2-K, X3-KS and X4-K to human FcγRIIB was improved by 2.18 to 9.83 folds compared to the affinity of IgG1-K322A.

[0049] FIG. 17B Improvement of affinity to human FcγRIIB by modification of Fc region. (B) Affinity of Fc region-modified antibody to human FcγRIIB (GMFI). The affinity of human IgG1 Fc region-modified antibodies X2-K, X3-KS and X4-K to human FcγRIIB was improved by 2.92 to 84.8 folds compared to IgG1-K322A having the same Fv region. “DF” means defucosylated.

[0050] FIG. 17C Improvement of affinity to human FcγRIIB by modification of Fc region. (C) Correlation between affinity of Fc region-modified antibody to human FcγRIIB (GMFI) and its agonistic activity (IC50: ng/ml). Individual plots represent the antibodies shown in FIG. 17B. When Fv region was the same, the tendency was such that the higher the affinity of Fc region to human FcγRIIB, the higher the agonistic activity.

[0051] FIG. 17D Improvement of affinity to human FcγRIIB by modification of Fc region. (D) Fc region-modified chimeric antibodies based on HM266 were prepared and their agonistic activities were evaluated. When IIA1.6 cells with low expression of human FcγRIIB were used, IgG1-K322A type and IgG4-S228P type antibodies, and known anti-human PD-1 agonist antibodies PD1AB-6 and 949 only showed a weak agonistic activity, whereas each of the Fc region-modified antibodies with improved affinity to human FcγRIIB showed a high agonistic activity.

[0052] FIG. 18 Immunosuppressive action of anti-human PD-1 agonist-human Fc region chimeric antibody in an evaluation system using human cells. Chimeric antibodies having the Fab region of HM266 and the Fc region of various Fc region-modified antibodies, chimeric antibodies with IgG1-K322A, and CTLA-4-Ig were evaluated using the MLR system of CD4⁺ T cells and CD19⁺ B cells. As a result, those chimeric antibodies whose affinity to human FcγRIIB had been improved by having the Fc region of Fc region-modified antibodies had a greatly improved T cell-suppressive activity compared to original IgG1-K322A from which they were derived, and they exerted an anti-inflammatory action superior to that of CTLA-4-Ig.

[0053] FIG. 19 Anti-inflammatory action of humanized anti-human PD-1 agonist antibody in an evaluation system using human cells. Humanized antibodies having a combination of the selected humanized Fab region (see FIG. 13) and the Fc region of human Fc region-modified antibodies were evaluated in the MLR system of CD4⁺ T cells and CD19⁺ B cells. It should be noted that all the antibodies shown here are Fc region-modified human IgG1. As a result, all of the Fc region-modified humanized antibodies with improved affinity to FcγRIIB exerted a more potent T cell-suppressive action than CTLA-4-Ig, suggesting that these humanized antibodies may be able to exhibit an anti-inflammatory action mediated by inhibition of human T cell function.

[0054] FIG. 20 Antibody-dependent cellular cytotoxicity (ADCC) activity of humanized anti-human PD-1 agonist antibody. Antibodies with X2-K as Fc region had low ADCC activity; antibodies with X3-KS as Fc region had ADCC activity comparable to that of IgG1-K322A; and antibodies with X4-K as Fc region or defucosylated X3-KS (X3-KS-DF) had high ADCC activity.

[0055] FIG. 21 Suppressive action of humanized anti-human PD-1 agonist antibody against antigen-specific T cell activation. CD4⁺ T cells activated and proliferated upon stimulation of human PBMC with tetanus toxoid were monitored by the decay of carboxyfluorescein succinimidyl ester (CFSE) fluorescence in CD4⁺ T cells. The data shows the percentage of CD4⁺ T cells whose CFSE fluorescence intensity was weakened as a result of cell proliferation. The antibodies showing high ADCC activity in FIG. 20 showed a high proliferation suppressive action comparable to or higher than that of CTLA-4-Ig. These results suggested that antibodies having high ADCC activity in addition to agonistic activity have a suppressive action against a wider range of inflammatory diseases.

[0056] FIG. 22 ERK phosphorylation suppressive action of anti-human PD-1 agonist antibody. Evaluation was performed in the same manner as shown in FIG. 3 using a system in which DO11.10 T cell hybridomas rendered to express human PD-1 were combined with IIA1.6 B cell lymphoma cells rendered to express not PD-L1 but mouse FcγRIIB. HM266 suppressed time-dependent increase in phosphorylated ERK positive ratio in DO11.10. This result suggested that anti-human PD-1 agonist antibody suppresses the downstream signal transduction of T cell receptors.

[0057] FIG. 23 The same graph as FIG. 3B but highlighting HM266, HM242, HM297, HM268 and J116. HM266, HM242, HM297 and HM268 showed higher agonistic activity than J116.

[0058] FIG. 24 Induction of allergic asthma in mouse and anti-inflammatory action of anti-human PD-1 agonist antibody. (A) A diagram showing a method of induction of allergic asthma and a schedule of antibody administration. Allergic asthma was induced according to the same schedule as shown in FIG. 6. (B-D) By administration of J116 which showed a weaker activity than HM266 in the evaluation system for in vitro PD-1 agonist activity in FIG. 3, the total number of inflammatory cells infiltrating the tissue was suppressed (B) and, in particular, infiltration of eosinophils was suppressed significantly (C) whereas no significant suppressive effect was observed with respect to CD4⁺ T cells (D).

[0059] FIG. 25 Anti-inflammatory action of anti-human PD-1 agonist antibody against allergic asthma and inhibition of Th2 type immune response. Allergic asthma was induced according to the same schedule as shown in FIG. 6, and bronchoalveolar lavage fluid was collected. Cytokine production in CD4⁺ cells infiltrating into the alveoli was examined by intracellular staining. As a result, a decrease in IL-5 and IL-13 producing cells was observed in J116 administration group, but a decrease in IL-4 producing cells and IL-10 producing cells as observed upon administration of HM266 was not observed. These results suggested the usefulness of anti-human PD-1 agonist antibody for treatment of allergic diseases, and also showed a tendency of correlation between in vitro agonistic activity and the effectiveness of in vivo model.

[0060] FIG. 26 Induction of colitis in mouse and anti-inflammatory action of anti-human PD-1 agonist antibody. T cell-dependent colitis was induced by transferring human PD-1 knock-in mouse-derived CD25⁻CD4⁺ T cells into RAG2 knock-out mice. (A-C) Analysis of the colon collected 8 weeks after cell transfer showed that compared to a control, the total number of cells in the lamina propria (A), CD4⁺ T cells infiltrating the lamina propria (B) and the ratio of IFN-γ positive and IL-17 positive cells in infiltrating CD4⁺ T cells (C) decreased significantly. These results suggested the applicability of anti-human PD-1 agonist antibody to treatment of inflammatory bowel diseases.

[0061] FIG. 27A Induction of acute GVHD in mouse and anti-inflammatory action of anti-human PD-1 agonist antibody. Splenocytes derived from C57BL/6 human PD-1 knock-in mice (donor) were transferred into BDF1 mice (recipient) to thereby induce acute GVHD. (A) A figure showing the expression of human PD-1 on CD4⁺ or CD8⁺ T cells in donor-derived cells (H-2K^{b+}H-2K^{d-}). In GVHD-induced mice, 61.7% of donor-derived CD4⁺ T cells and 49.5% of donor-derived CD8⁺ T cells were positive for human PD-1.

[0062] FIG. 27BCD Induction of acute GVHD in mouse and anti-inflammatory action of anti-human PD-1 agonist antibody. (B-D) AST (B), ALT (C) and IFN-γ (D) in mouse plasma 2 weeks after induction. Induction of GVHD increased the plasma levels of ALT, AST, and IFN-γ, but preventive administration of HM266, HM242, HM297 and HM268 suppressed these increases remarkably.

[0063] FIG. 28ABCD Induction of T cell-dependent antibody response in mouse and antibody production suppressive action of anti-human PD-1 agonist antibody. T cell-dependent antibody response was induced in C57BL/6 human PD-1 knock-in mice by intraperitoneal administration of 4-hydroxy-3-nitrophenylacetyl ovalbumin (NP-OVA) antigen together with alum adjuvant. Administration of HM266 suppressed the ratios of Tfh cells (A), germinal center B cells (B), class switched B cells (C) and plasma cells (D) in the mouse spleen 10 days after antigen administration.

[0064] FIG. 28E Further, an increase in blood IL-21 concentration was also observed as a result of antigen administration, but administration of HM266 suppressed this increase (E).

[0065] FIG. 28F Furthermore, analysis of the antibody titer in plasma conducted 7 days after antigen administration revealed that low-affinity IgG antibody titer (anti-NP25 IgG) and high-affinity IgG/IgM antibody titer (anti-NP2 IgG or IgM) had been suppressed (F). These results suggest a possibility that administration of anti-human PD-1 agonist antibody may suppress antibody class switching and affinity maturation.

[0066] FIG. 29ABCD Induction of chronic GVHD/lupus-like symptoms in mouse and anti-inflammatory action of anti-human PD-1 agonist antibody. Splenocytes derived from C57BL/6 human PD-1 knock-in mice (donor) were freed of CD8⁺ cells and then transferred into BDF1 mice (recipient) to thereby induce chronic GVHD/lupus-like symptoms. After cell transfer, donor-derived Tfh cells (A), recipient-derived germinal center B cells (B), class switched B cells (C) and plasma cells (D) were confirmed to increase remarkably in the recipient's spleen. When HM242 or CTLA-4-Ig was preventively administered to this inflammation model, these increases were suppressed. Mark “-” represents recipient mice into which no donor cells were transferred.

[0067] FIG. 29EF Induction of chronic GVHD/lupus-like symptoms in mouse and anti-inflammatory action of anti-human PD-1 agonist antibody. Splenocytes derived from C57BL/6 human PD-1 knock-in mice (donor) were freed of CD8⁺ cells and then transferred into BDF1 mice (recipient) to thereby induce chronic GVHD/lupus-like symptoms. After cell transfer, IL-21 concentration (E) and anti-dsDNA antibody titer (F) were confirmed to increase remarkably in the blood. Prophylactic administration of HM242 or CTLA-4-Ig to this inflammation model suppressed the increase in blood anti-dsDNA antibody. These results suggested the applicability of anti-human PD-1 agonist antibody to treatment of inflammatory diseases that involve autoantibody production.

[0068] FIG. 30 Immunosuppressive action of anti-human PD-1 agonist-human Fc region chimeric antibody in an evaluation system using human cells. Chimeric antibodies having the Fab region of HM266 and the Fc region of various Fc region-modified antibodies, and chimeric antibodies with the Fc region of IgG1-K322A or IgG4-S228P were evaluated in a co-culture system of CD4⁺ T cells and a human monocytic cell line THP-1 using IFN-γ production as an indicator. When evaluation was performed using THP-1 into which human FcγRIIB gene had been artificially introduced to be expressed highly, chimeric antibodies having the Fab region of HM266 and the Fc region of IgG1-K322A or IgG4-S228P exhibited an immunosuppressive activity comparable to or greater than that of known antibodies (A). On the other hand, in an evaluation system using THP-1 which did not undergo gene transfer but which expressed endogenous FcγRIIB, chimeric antibodies with IgG1-K322A or IgG4-S228P and known antibodies did not exhibit an immunosuppressive activity but each of the Fc region-modified antibodies with improved affinity to human FcγRIIB exhibited high immunosuppressive activity (B). These results revealed that those chimeric antibodies whose affinity to human FcγRIIB was improved by having the Fc region of Fc region-modified antibodies were greatly improved in T cell suppressive activity compared to original IgG1-K322A from which they were derived.

[0069] FIG. 31 ADCC activity of anti-human PD-1 agonist-human Fc region chimeric antibody. Antibodies with X2 type as Fc region had low ADCC activity; and antibodies with X3 or X4 type as Fc region had high ADCC activity at least comparable to that of antibodies with IgG1-K322A type as Fc region. Fc region-modified antibodies based on the Fc region of IgG4-S228P had an improved ADCC activity compared to IgG4-S228P, but it was not as high as the ADCC activities of IgG1-K322A type as well as X3 and X4 types.

[0070] FIG. 32 Suppressive action of humanized anti-human PD-1 agonist antibody against antigen-specific T cell activation. The immunosuppressive activity was evaluated using, as an indicator, IFN-γ produced when human PBMC was stimulated with tetanus toxoid. The antibodies showing a high CD4+ cell proliferation suppressive effect at least comparable to that of CTLA-4-Ig in FIG. 21 also suppressed the production of IFN-γ, but the antibodies with X3-KS-DF as Fc region inhibited the production of IFN-γ even in low concentration ranges.

[0071] FIG. 33 Suppressive action of humanized anti-human PD-1 agonist antibody against activation of human Tfh cells. Human CD4+ T cells that had been differentiated into Tfh-like cells by culturing in the presence of individual cytokines were co-cultured with THP-1 cells, stimulated by CytoStim and evaluated the activation using IL-21 as an indicator. As a result, humanized anti-human PD-1 agonist antibody suppressed the IL-21 production by Tfh-like cells.

[0072] FIG. 34 Immunosuppressive action of humanized anti-human PD-1 agonist antibody against autoimmune disease patient-derived cells. PBMC derived from patients with rheumatoid arthritis (RA) (A, B) and systemic lupus erythematosus (SLE) (C, D) were cultured in the presence of autoantigen and evaluated the activation using the proliferation of CD4⁺ T cells (A, C) and IFN-γ production (B, D) as indicators. As a result, humanized anti-human PD-1 agonist antibody showed suppressive activity against the activation of patient-derived cells in response to self-antigen stimulation equal to or more than CTLA-4-Ig.

[0073] FIG. 35 Improvement of affinity to human FcγRIIB by modification of Fc region. (A) Affinity of Fc region-modified antibodies to human FcγRIIB (K_{D} value). The affinity of human IgG1 Fc region-modified antibodies to human FcγRIIB was improved by 2.34 to 8.65 folds compared to that of IgG1-K322A. (B) Affinity of Fc region-modified antibodies to human FcγRIIB (GMFI). The affinity of human IgG1 Fc region-modified antibodies to human FcγRIIB was improved by 26.1 to 180 folds compared that of IgG1-K322A.

[0074] FIG. 36A Improvement of affinity for human FcγRIIIA by modification of Fc region. (A) Affinity (K_{D} value) of Fc region-modified antibodies to human FcγRIIIA (V158). The affinity to human FcγRIIIA (V158) of human IgG1 antibodies in which the Fc region was modified with X4-K, X3-KS-DF. X3-K, X3-KSI, X3-KI or X3-KE was improved by 2.92 to 7.55 folds compared to that of antibody with IgG1-K322A as Fc region.

[0075] FIG. 36B Improvement of affinity for human FcγRIIIA by modification of Fc region. (B) Affinity of Fc region-modified antibodies to human FcγRIIIA (V158) (GMFI). The affinity to human FcγRIIIA (V158) of human IgG1 antibodies in which the Fc region was modified with X4-K, X3-KS-DF, X3-K, X3-KSI, X3-KI and X3-KE was improved by 1.92 to 6.98 folds compared to IgG1-K322A having the same Fv region.

[0076] FIG. 37 Improvement of agonistic activity by modification of Fc region. As a result of evaluation using IIA1.6 cells with low expression of human FcγRIIB, the known anti-human PD-1 agonist antibodies 3.7C6 and Antibody 1 showed only a weak agonistic activity, but each of the Fc region-modified antibodies with an improved affinity to human FcγRIIB showed high agonistic activity.

[0077] FIG. 38 Anti-inflammatory action of humanized anti-human PD-1 agonist antibody in an evaluation system using human cells. Humanized antibodies having a combination of the humanized Fab region of HM268-K8 and the Fc region of human Fc region-modified antibodies were prepared, and evaluated by the MLR system of CD4⁺ T cells and CD19⁺ B cells in the same manner as in FIG. 19. As a result, all the Fc region-modified humanized antibodies with an improved affinity to FcγRIIB exerted a more potent T cell-suppressive action than CTLA-4-Ig, suggesting that these humanized antibodies are able to show an anti-inflammatory action through inhibition of human T cell function.

[0078] FIG. 39 ADCC activity of humanized anti-PD-1 agonist antibody. Antibodies with X3-KSL or X3-KL as Fc region had low ADCC activity, whereas antibodies with X3-KSI, X3-KI or X3-KS-DF as Fc region had high ADCC activity.

[0079] FIG. 40 Suppressive action of humanized anti-human PD-1 agonist antibody against antigen-specific T cell activation. In the same manner as in FIG. 21, CD4⁺ T cells activated and proliferated upon stimulation of human PBMC with tetanus toxoid were monitored by the decay of carboxyfluorescein succinimidyl ester (CFSE) fluorescence in CD4⁺ T cells. The data shows the percentage of CD4⁺ T cells whose CFSE fluorescence intensity was weakened as a result of cell proliferation. The antibodies showing high ADCC activity in FIG. 39 showed an especially high proliferation suppressive effect. In the case of using cells derived from a different donor than the cells used in FIG. 21, CTLA-4-Ig did not show any proliferation suppressive effect. These results suggested that antibodies having high ADCC activity in addition to a high agonistic activity have a suppressive effect on a wider range of inflammatory diseases and can consistently exert a suppressive effect on different donors.

### BEST MODES FOR CARRYING OUT THE INVENTION

[0080] Hereinbelow, embodiments of the present invention will be described in detail.

[0081] The present invention provides an agonist antibody to human PD-1 (anti-human PD-1 agonist antibody) or a functional fragment thereof, wherein the antibody or a functional fragment thereof
[0082] (a) binds to domain #7 of human PD-1 as shown in SEQ ID NO: 1, and
[0083] (b) has an improved affinity to human Fc receptors.

[0084] As used herein, the “anti-human PD-1 agonist antibody” may be antibodies which bind to human PD-1 and trigger an intracellular signal transduction system similar to that triggered by human PD-L1 in the human body. Such antibodies may be selected in a co-culture system of T cells rendered to express human PD-1 and antigen-presenting cells rendered to express human FcγRIIB, using as an indicator the activity to suppress IL-2 which is produced from T cells in an antigen stimulation dependent manner (see Example described later).

[0085] The antibody of the present invention or a functional fragment thereof may bind to only domain #7 of human PD-1 (SEQ ID NO: 9; domain spanning from amino acid No. 38 to No. 48 in the amino acid sequence as shown in SEQ ID NO: 1) or may also bind to other domains of human PD-1 such as domain #6 (SEQ ID NO: 8; domain spanning from amino acid No. 109 to No. 120 in the amino acid sequence as shown in SEQ ID NO: 1) or domain #1 (SEQ ID NO: 3; domain spanning from amino acid No. 129 to No. 139 in the amino acid sequence as shown in SEQ ID NO: 1). Preferably, the antibody or a functional fragment thereof binds to only domain #7 of human PD-1. When the binding capacity of an anti-human PD-1 antibody is decreased by replacing domain #7 of human PD-1 as shown in SEQ ID NO: 1 with the amino acid sequence of the corresponding domain in the amino acid sequence of mouse PD-1 (SEQ ID NO: 2), the anti-human PD-1 antibody can be defined as binding to domain #7 of human PD-1 as shown in SEQ ID NO: 1. Here, the binding to domain #7 is judged independently from the binding to other domains of human PD-1. The binding to domains of human PD-1 other than #7 is defined in the same manner. The amino acid sequence of human PD-1 is registered at the NCBI database under accession number: NP_005009.2, and the amino acid sequence of mouse PD-1 at the NCBI database under accession number: NP_032824.1. Preferably, the antibody of the present invention or a functional fragment thereof also binds to substituted mouse PD-1 (Mouse PD-1 (hu38-48)) in which the amino acid sequence of domain #7 of mouse PD-1 is replaced with the amino acid sequence of domain #7 of human PD-1 and/or mutant human PD-1 (R143A point mutant) in which arginine at position 143 of human PD-1 is mutated to alanine.

[0086] The binding capacity (binding affinity) of the antibody of the present invention or a functional fragment thereof to human PD-1 may be 10⁻⁷ M or less, preferably 10⁻⁸ M or less, in terms of equilibrium dissociation constant (K_{D}). Equilibrium dissociation constant is measured by the surface plasmon resonance (SPR) method. The binding capacity of the antibody of the present invention or a functional fragment thereof to human PD-1 can also be measured by flow cytometry using the concentration dependency of binding to PD-1 expressing cells.

[0087] Examples of the sequences of the heavy chain CDR1 to CDR3 and the light chain CDR1 to CDR3 of the antibodies of the present invention are shown in Table I below. CDRs may be identified by algorithms such as Kabat (J Exp Med. 1970; 132: 211-50), Chothia (J Mol Biol. 1987; 196: 901-17), IMGT (Dev Comp Immunol. 2003; 27: 55-77) and Paratome (PLOS Comput Biol. 2012; 8: e1002388), preferably by Kabat's method. In Table I, HM242, HM266, HM268 and HM297 are mouse anti-human PD-1 antibodies exhibiting PD-1 agonist activity that were prepared by immunizing mice with human PD-1. The antibody of the present invention may advantageously have a heavy chain variable region comprising heavy chain CDR1, CDR2 and CDR3 and a light chain variable region comprising light chain CDR1, CDR2 and CDR3, as shown in Table I below. In the antibody of the present invention, the heavy chain CDR1, CDR2 and CDR3 and the light chain CDR1, CDR2 and CDR3 may comprise sequences having at least 85%, 85-90%, 90-95%, 95-97% or 97% or more identity with the sequences as shown in Table I, in terms of CDR as a whole. Identity between two sequences can be determined using BLAST.

TABLE I
Sequences of the heavy chain CDR1,
CDR2 and CDR3 and the light chain CDR1, CDR2
and CDR3 in HM242, HM266, HM268 and HM297

| | | Heavy Chain | | | Light Chain | | |
|---|---|---|---|---|---|---|---|
| | | CDR1 | CDR2 | CDR3 | CDR1 | CDR2 | CDR3 |
| HM242 | Kabat | SYYIQ | WIYPGDGTTKYNEKFKG | YYGSYFDY | RASQDISNYLN | YTSKLHS | QQSSTLPFT |
| | Chothia | GYTFTSY | YPGDGT | YYGSYFDY | RASQDISNYLN | YTSKLHS | QQSSTLPFT |
| | IMGT | GYTFTSYY | IYPGDGTT | ASYYGSYFDY | QDISNY | YTS | QQSSTLPFT |
| | Paratome | YTFTSYYIQ | WIGWIYPGDGTTKY | SYYGSYFDY | QDISNY | LLIYYTSKLHS | QQSSTLPF |
| HM266 | Kabat | SYYIQ | WIYPGDGSSKYNEKFKG | YYGSSFDY | RASQDISNYLN | YSSRLHS | QQGSTLPFT |
| | Chothia | GYTFTSY | YPGDGS | YYGSSFDY | RASQDISNYLN | YSSRLHS | QQGSTLPFT |
| | IMGT | GYTFTSYY | IYPGDGSS | ASYYGSSFDY | QDISNY | YSS | QQGSTLPFT |
| | Paratome | YTFTSYYIQ | WIGWIYPGDGSSKY | SYYGSSFDY | QDISNY | FLIYYSSRLHS | QQGSTLPF |
| HM268 | Kabat | SYYIQ | WIYFGDASTKYNEKFKG | YYGSYFDY | RASQDISNYLN | STSRLHS | QQGSTLPFT |
| | Chothia | GYTFTSY | YAGDAS | YYGSYFDY | RASQDISNYLN | STSRLHS | QQGSTLPFT |
| | IMGT | GYTFTSYY | IYFGDAST | ASYYGSYFDY | QDISNY | STS | QQGSTLPFT |
| | Paratome | YTFTSYYIQ | WIGWIYFGDASTKY | SYYGSYFDY | QDISNY | LLIYSTSRLHS | QQGSTLPF |
| HM297 | Kabat | DYNVD | DIDPNNGGTIYNQKFKD | WRGAMDY | RASQDIDNYLK | DTSRLHS | QQGYTLPWT |
| | Chothia | GYTFTDY | DPNNGG | WRGAMDY | RASQDIDNYLK | DTSRLHS | QQGYTLPWT |
| | IMGT | GYTFTDYN | IDPNNGGT | ARWRGAMDY | QDIDNY | DTS | QQGYTLPWT |
| | Paratome | YTFTDYNVD | WIGDIDPNNGGTIY | RWRGAMDY | QDIDNY | LLIYDTSRLHS | QQGYTLPW |

[0088] The variable region (Fv) of the antibody of the present invention may be the Fv region of an antibody derived from an animal other than human (for example, mouse, rabbit, rat, hamster, guinea pig, goat, sheep, donkey, llama, camel, chicken, ostrich, shark, etc.) or it may be a humanized Fv region of the heavy chain and/or the light chain of an antibody derived from a non-human animal. Humanization may be performed, for example, by transplanting the CDRs of VH and VL of non-human animal-derived antibodies into the frameworks of VH and VL of human antibodies (Nature, 332, 323-327, 1988). Humanized antibody may be one in which CDR sequences are retained. Alternatively, humanized antibody may also be one in which antigen binding is improved by, for example, identifying the amino acid residues directly involved in binding to antigen, the amino acid residues interacting with CDRs and the amino acid residues involved in retaining the three-dimensional structure of CDRs, and replacing these residues with amino acid residues of non-humanized antibodies (MABS, 8(7), 1302-1318, 2016).

[0089] Table II below shows exemplary sequences of the heavy chain variable region (VH region; position 1 to 117; according to EU numbering; hereinafter, the same shall apply) of mouse-derived antibodies exhibiting PD-1 agonist activity, as well as examples of their humanized VH region sequences.

TABLE II
Sequences of the heavy chain variable region (VH region) of HM242, HM266,
HM268 and HM297, and VH region of humanized HM242, HM266, HM268 and HM297

| HM242 | mouse | | QVQLQQSGPELVKPGASVKMSCKASGYTFTSYYIQWVKQRPGQGLEWIGWIYPGDGTTKYN |
|---|---|---|---|
| | | | EKFKGKTTLTIDKSSRTAYMLFNSLTSEDSGIYFCASYYGSYFDYWGQGTTLTVSS |
| | humanized | A | QVQLVQSGPELVKPGASVKVVCKASGYTFTSYYIQWVKQRPGQGLEWIGWIYPGDGTTKYN |
| | | | EKFKGKTTLTIDKSTRTAYMELRSLRSDDTAVYYCASYYGSYFDYWGQGTLVTVSS |
| | | B | QVQLVQSGPEVKKPGASVKVVCKASGYTFTSYYIQWVRQVPGQGLEWMGWIYPGDGTTKYN |
| | | | EKFKGKTTLTIDKSTRTAYMELRSLRSDDTAVYYCASYYGSYFDYWGQGTLVTVSS |
| | | C | QVQLVQSGPEVKKPGASVKVVCKASGYTFTSYYIQWVKQRPGQGLEWIGWIYPGDGTTKYN |
| | | | EKFKGRVTMTIDKSTRTAYMELRSLRSDDTAVYYCASYYGSYFDYWGQGTLVTVSS |
| | | D | QVQLVQSGPEVKKPGASVKVVCKASGYTFTSYYIQWVRQVPGQGLEWMGWIYPGDGTTKYN |
| | | | EKFKGRVTMTIDTSTSTAYMELRSLRSDDTAVYYCASYYGSYFDYWGQGTLVTVSS |
| HM297 | mouse | | EVLLQQSGPELVKPGASVKIPCKASGYTFTDYNVDWVRQSHGKSLEWIGDIDPNNGGTIYN |
| | | | QKFKDKATLTVDKSSRTAYMELRSLTSEDTAVYYCARWRGAMDYWGQGTSVTVSS |
| | humanized | E | QVQLVQSGPELVKPGASVKIPCKASGYTFTDYNVDWVRQSHGKSLEWIGDIDPNNGGTIYN |
| | | | QKFKDKATLTVDKSTRTAYMELRSLRSDDTAVYYCARWRGAMDYWGQGTLVTVSS |
| | | F | QVQLVQSGPEVKKPGASVKIPCKASGYTFTDYNVDWVRQSHGKSLEWIGDIDPNNGGTIYN |
| | | | QKFKDRVTMTVDKSTRTAYMELRSLRSDDTAVYYCARWRGAMDYWGQGTLVTVSS |
| | | G | QVQLVQSGPEVKKPGASVKIPCKASGYTFTDYNVDWVRQVPGQGLEWIGDIDPNNGGTIYN |
| | | | QKFKDKATLTVDKSTRTAYMELRSLRSDDTAVYYCARWRGAMDYWGQGTLVTVSS |
| | | H | QVQLVQSGPEVKKPGASVKIPCKASGYTFTDYNVDWVRQVPGQGLEWMGDIDPNNGGTIYN |
| | | | QKFKDRVTMTVDKSTRTAYMELRSLRSDDTAVYYCARWRGAMDYWGQGTLVTVSS |
| | | I | QVQLVQSGPEVKKPGASVKVVCKASGYTFTDYNVDWVRQVPGQGLEWMGDIDPNNGGTIYN |
| | | | QKFKDRVTMTVDTSTRTAYMELRSLRSDDTAVYYCARWRGAMDYWGQGTLVTVSS |
| HM268 | mouse | | QVQLQQSGPELVKPGASVKMPCKTSGYTFTSYYIQWLKQRPGQGLEWIGWIYFGDASTKYN |
| | | | EKFKGKTTLTADKSSSTAYMLLSSLTSEDSGIYFCASYYGSYFDYWGQGTTLTVSS |
| | humanized | J | QVQLVQSGPEVKKPGASVKVVCKTSGYTFTSYYIQWVRQVPGQGLEWMGWIYFGDASTKYN |
| | | | EKFKGKTTLTADKSTSTAYMELRSLRSDDTAVYYCASYYGSYFDYWGQGTTVTVSS |
| | | K | QVQLVQSGPEVKKPGASVKVVCKTSGYTFTSYYIQWLKQRPGQGLEWIGWIYFGDASTKYN |
| | | | EKFKGRVTMTADKSTSTAYMELRSLRSDDTAVYYCASYYGSYFDYWGQGTTVTVSS |
| | | L | QVQLVQSGPEVKKPGASVKVVCKTSGYTFTSYYIQWVRQVPGQGLEWMGWIYFGDASTKYN |
| | | | EKFKGRVTMTADTSTSTAYMELRSLRSDDTAVYYCASYYGSYFDYWGQGTTVTVSS |
| | | M | QVQLVQSGPEVKKPGASVKVVCKASGYTFTSYYIQWVRQVPGQGLEWMGWIYFGDASTKYN |
| | | | EKFKGRVTMTADTSTSTAYMELRSLRSDDTAVYYCASYYGSYFDYWGQGTTVTVSS |

| | | |
|---|---|---|
| HM266 | mouse | QVQLQQSGPELVKPGASVKMSCKASGYTFTSYYIQWVKQRPGQGLEWIGWIYPGDGSSKYN |
| | | EKFKGKTTLTADKSSSTAYMLLSSLTSEDSGIYFCASYYGSSFDYWGQGTTLTVSS |

[0090] Table III below shows exemplary sequences of the light chain variable region (VL region; position 1 to 107) of mouse-derived antibodies exhibiting PD-1 agonist activity, as well as examples of their humanized VH region sequences.

TABLE III
Sequences of the light chain variable region (VL region) of HM242, HM266,
HM268 and HM297, and VL region of humanized HM242, HM266, HM268 and HM297

| HM242 | mouse | | DIQMTQTTSSLSASLGDRVTISCRASQDISNYLNWYQQKPDGTVTLLIYYTSKLHSGVPSRFS |
|---|---|---|---|
| | | | GSGSGTDYSLTITNLEQKDFATYFCQQSSTLPFTFGGGTKLEIK |
| | humanized | 1 | DIQMTQTTSSLSASVGDRVTITCRASQDISNYLNWYQQKPDGTVTLLIYYTSKLHSGVPSRFS |
| | | | GSGSGTDYTLTISSLEQKDFATYYCQQSSTLPFTFGQGTKLEIK |
| | | 2 | DIQMTQSPSSLSASVGDRVTITCRASQDISNYLNWYQQKPDGTVTLLIYYTSKLHSGVPSRFS |
| | | | GSGSGTDYTLTISSLQPEDFATYYCQQSSTLPFTFGQGTKLEIK |
| | | 3 | DIQMTQSPSSLSASVGDRVTITCRASQDISNYLNWYQQKPGKAPKLLIYYTSKLHSGVPSRFS |
| | | | GSGSGTDYTLTISSLQPEDFATYYCQQSSTLPFTFGQGTKLEIK |
| HM297 | mouse | | DVQMTQTTSSLSASLGDRVTISCRASQDIDNYLKWYQQKPDGTVKLLIYDTSRLHSGVPSRFS |
| | | | GSGSGTDYSLTISNLKQEDIATYFCQQGYTLPWTFGGGTRLEIK |
| | humanized | 4 | DIQMTQTTSSLSASVGDRVTITCRASQDIDNYLKWYQQKPDGTVKLLIYDTSRLHSGVPSRFS |
| | | | GSGSGTDYTLTISSLKQEDFATYYCQQGYTLPWTFGQGTKLEIK |
| | | 5 | DIQMTQSPSSLSASVGDRVTITCRASQDIDNYLKWYQQKPDGTVKLLIYDTSRLHSGVPSRFS |
| | | | GSGSGTDYTLTISSLKQEDFATYYCQQGYTLPWTFGQGTKLEIK |
| | | 6 | DIQMTQSPSSLSASVGDRVTITCRASQDIDNYLKWYQQKPGKAPKLLIYDTSRLHSGVPSRFS |
| | | | GSGSGTDYTLTISSLQPEDFATYYCQQGYTLPWTFGQGTKLEIK |
| HM268 | mouse | | NIQMTQNTSSLSATLGVRVTISCRASQDISNYLNWYQQKPDGTVKLLIYSTSRLHSGIPSRFS |
| | | | GSGSGTDYSLTISNLEQEDIATYFCQQGSTLPFTFGGGTKLEIK |
| | humanized | 7 | DIQMTQNTSSLSASVGDRVTITCRASQDISNYLNWYQQKPDGTVKLLIYSTSRLHSGVPSRFS |
| | | | GSGSGTDYTLTISSLEQEDFATYYCQQGSTLPFTFGQGTKLEIK |
| | | 8 | DIQMTQSPSSLSASVGDRVTITCRASQDISNYLNWYQQKPDGTVKLLIYSTSRLHSGVPSRFS |
| | | | GSGSGTDYTLTISSLQPEDFATYYCQQGSTLPFTFGQGTKLEIK |
| | | 9 | DIQMTQSPSSLSASVGDRVTITCRASQDISNYLNWYQQKPGKAPKLLIYSTSRLHSGVPSRFS |
| | | | GSGSGTDYTLTISSLQPEDFATYYCQQGSTLPFTFGQGTKLEIK |

| | | |
|---|---|---|
| HM266 | mouse | DIQMTQTTSSLSASLGDRVTISCRASQDISNYLNWYQQKPDGTVKFLIYYSSRLHSGVPSRFS |
| | | GSGSGTDYSLTISNLEQEDIATYFCQQGSTLPFTFGGGTKLEIK |

[0091] The antibody of the present invention may be one having the heavy chain variable region and/or the light chain variable region as shown in Tables II and/or Table III above. In the antibody of the present invention, the heavy chain variable region and the light chain variable region may individually comprise a sequence having at least 90%, 90-95%, 95-99% or 99% or more identity with the sequences as shown in Tables II and III above.

[0092] The antibody of the present invention may be one which has an improved affinity to human Fc receptors. The Fc receptor is preferably Fcγ receptor (FcγR), more preferably FcγRII, and still more preferably FcγRIIB. The binding affinity of the antibody of the present invention to human Fc receptors may be evaluated by a flow cytometer-based binding test for human Fc receptor-expressing cell line, or an human Fc receptor binding affinity test using surface plasmon resonance technology with Biacore 8K (Cytiva). The improvement in the affinity of the antibody of the present invention to human Fc receptors may be evaluated by either of the methods mentioned above. Preferably, the improvement is evaluated by flow cytometer, and more preferably, the improvement is evaluated by both methods. When measured by the human FcγRIIB binding affinity test using surface plasmon resonance technology, the affinity of the antibody of the present invention to human FcγRIIB can be expressed as an equilibrium dissociation constant (K_{D}) ratio to an antibody having the Fc region of human IgG1-K322A (reference antibody). The antibody of the present invention has 1.5-fold or more affinity than the reference antibody, preferably 2-fold or more affinity than the reference antibody, and more preferably 2.5-fold or more affinity than the reference antibody (see Example described later). When measured by the flow cytometer-based binding test for human Fc receptor-expressing cell line, the affinity of the antibody of the present invention to human FcγRIIB can be expressed as a GMFI ratio to an antibody having the Fc region of human IgG1-K322A (reference antibody). Under measuring conditions where a GMFI value without antibody addition is about 40 and a GMFI value with addition of the reference antibody is 300-1500, the antibody of the present invention shows 2-fold or more GMFI, preferably 5-fold or more GMFI, and more preferably 20-fold or more GMFI as compared with the case where the reference antibody having the same Fv region is added.

[0093] The antibody of the present invention may also be one which has an improved affinity to human FcγRIIIA. When measured by the Fc receptor binding affinity test using surface plasmon resonance technology; the affinity of the antibody of the present invention to human FcγRIIIA(V158) can be expressed as an equilibrium dissociation constant (K_{D}) ratio to an antibody having the Fc region of human IgG1-K322A (reference antibody). The antibody of the present invention has 1.5-fold or more affinity than the reference antibody, preferably 2-fold or more affinity than the reference antibody, more preferably 2.5-fold or more affinity than the reference antibody, and still more preferably 4-fold or more affinity than the reference antibody (see Example described later). When measured by the flow cytometer-based binding test for human Fc receptor-expressing cell line, the affinity of the antibody of the present invention to human FcγRIIIA(V158) can be expressed as a GMFI ratio to an antibody having the Fc region of human IgG1-K322A (reference antibody). Under measuring conditions where a GMFI value without antibody addition is about 10 and a GMFI value with addition of the reference antibody is 6000-15000, the antibody of the present invention shows 1.5-fold or more GMFI, preferably 2-fold or more GMFI, more preferably 4-fold or more GMFI, and still more preferably 5.0-fold or more GMFI as compared with the case where the reference antibody having the same Fv region is added.

[0094] The antibody of the present invention may be one having the Fc region of a human antibody (for example, IgG1, IgG4, etc.) and, preferably; the Fc region (position 216 to 447) of the human antibody is modified so that the affinity to human Fc receptors (at least one of human FcγRIIA, human FcγRIIB, human FcγRIIIA) is improved. By modifying the Fc region of an antibody, its affinity to human Fc receptors can be improved. Alternatively, the affinity of an antibody to human Fc receptors can also be improved by defucosylation treatment.

[0095] One example of the amino acid sequence of the Fc region of human IgG1 is shown in SEQ ID NO: 47, and one example of the amino acid sequence of the Fc region of human IgG4 is shown in SEQ ID NO: 64. As a means to improve the affinity of the antibody of the present invention to human Fc receptors, a mutation(s) may be introduced, for example, to at least one position, preferably a combination of positions, selected from the group of amino acid positions consisting of 233, 234, 236, 237, 238, 239, 267, 268, 271, 296, 323, 326, 328, 330 and 332 (according to EU numbering; hereinafter, the same shall apply) in the amino acid sequence of the Fc region of human IgG1 as shown in SEQ ID NO: 47. Further, such mutation(s) may be combined with defucosylation. When mutations are introduced into a combination of positions, for example, it may be selected from among 236/268, 239/268, 239/268/328/332, 239/267/268, 239/267/268/328, 239/267/268/332, 239/268/328, 239/268/332, 239/267/268/328/332, 233/237/238/268/271/330 and 267/328, preferably from among 239/268, 239/268/328/332, 239/267/268, 239/267/268/328332, 239/268/332, 233/237/238/268/271/330 and 267/328, and more preferably from among 239/268/328/332, 233/237/238/268/271/330 and 267/328. G at position 236 may be mutated to, for example, D, E, N, Q, F, H, I, K, L, M, P, R, S, T, V, W, Y or A, preferably to D, E, N or Q, and more preferably to D. H at position 258 may be mutated to, for example, D, E, N, Q, A or G, preferably to D, E, N or Q, and more preferably to D. S at position 239 may be mutated to, for example, D, E, N, Q, F, T, H, Y, G or L, preferably to D, E, N or Q, and more preferably to D. L at position 328 may be mutated to, for example, Y, E, F, H, I, Q, W, D, T, S, M, A, V. N or H, preferably to Y, F, D, E, N or Q, and more preferably to Y. I at position 332 may be mutated to, for example, E, D, F, L, R, S, T, D, N, Q, H, Y, A or M, preferably to E, T or M, and more preferably to E. E at position 233 may be mutated to, for example, D. G at position 237 may be mutated to, for example, W, F, A, D, E, L, M or Y, preferably to D or E, and more preferably to D. P at position 238 may be mutated to, for example, D. P at position 271 may be mutated to, for example, G. A at position 330 may be mutated to, for example, K, R or M, preferably to R. S at position 267 may be mutated to, for example, E, V, Q, A or L, preferably to E or G, and more preferably to G. K at position 326 may be mutated to, for example, L, Q, N, M, D, S, T or A. L at position 234 may be mutated to, for example, D, E, N, Q, T, H, I, V, F, W or Y. V at position 323 may be mutated to, for example, I, L or M. Y at position 296 mat be mutated to, for example, D.

[0096] When mutation(s) is/are to be introduced into the Fc region of human IgG1, they may be combined with other mutations depending on the purpose, as exemplified by K322A (a mutation known to suppress complement-dependent cytotoxicity (CDC) activity by decreasing the binding of complement C1q) or E293A (a mutation known to suppress ADCC activity by decreasing the binding to FcγRIIIA).

[0097] The combination of mutations to be introduced into the Fc region of human IgG1 may be any one of the following combinations: G236D/H268D, S239D/H268D, S239D/H268D/L328Y/I332E, G236D/H268D/K322A, S239D/H268D/K322A, S239D/S267G/H268D/K322A, G236D/H268D/E293A/K322A, S239D/H268D/K322A/L328Y/I332E, S239D/H268D/E293A/K322A, S239D/S267G/H268D/K322A/L328Y, S239D/S267G/H268D/K322A/I332E, S239D/H268D/K322A/L328Y, S239D/H268D/K322A/I332E, S239D/S267G/H268D/K322A/L328Y/I332E, E233D/G237D/P238D/H268D/P271G/A330R, or S267E/L328F. Preferably, the combination may be any one of the following combinations: S239D/H268D/K322A, S239D/S267G/H268D/K322A, G236D/H268D/E293A/K322A, S239D/H268D/K322A/L328Y/I332E, S239D/H268D/E293A/K322A, S239D/S267G/H268D/K322A/I332E, S239D/H268D/K322A/I332E, E233D/G237D/P238D/H268D/P271G/A330R, or S267E/L328F.

[0098] When mutations are to be combined with defucosylation in the Fc region of human IgG, the combination of mutations in the Fc region should be such that defucosylation improves affinity for human Fc receptor, especially human FcγRIIIA, 1.5-fold or more affinity than the fucosylated IgG having same mutations, preferably 2-fold or more affinity than the fucosylated IgG having same mutations, more preferably 4-fold or more affinity than the fucosylated IgG having same mutations. Preferred mutation and defucosylation combinations include, but are not limited to, S239D/S267G/H268D/K322A and defucosylation combinations.

[0099] As an exemplary means to improve the affinity to human Fc receptors, a mutation may be introduced at any one or more of the following positions: 236, 239, 268, 328, or 332 in the amino acid sequence of the Fc region of human IgG4 as shown in SEQ ID NO: 64, for example. Preferably, a mutation may be introduced at a combination of those positions. Further, such mutations may be combined with defucosylation.

[0100] When a mutation is to be introduced into the Fc region of human IgG4, it may be combined with other mutations such as S228P that is known to be effective for improving antibody stability.

[0101] When mutations are to be combined, the combination may be selected from among S228P/G236D/Q268D, S228P/S239D/Q268D and S228P/S239D/Q268D/L328Y/I332E, more preferably from between S228P/S239D/Q268D and S228P/S239D/Q268D/L328Y/I332E.

[0102] Table IV shows exemplary sequences of Fc regions of human IgG1 (WT and K322A) and IgG4 (WT and S228P), as well as examples of the sequences of Fc regions in their Fc region modified forms with mutations introduced.

TABLE IV
Fc regions of human IgG1 (WT and K322A)
and IgG4 (WT and S228P), as well as
Fc regions in their Fc region modified forms

| | | | |
|---|---|---|---|
| IgG1- | IgG1 (WT) | — | [symbol] |
| type | | | [symbol] |
| | | | [symbol] |
| | IgG1-K322A | K322A | [symbol] |
| | | | [symbol] |
| | | | [symbol] |
| | X2 | G236D/H268D | [symbol] |
| | | | [symbol] |
| | | | [symbol] |
| | X3 | S239D/H268D | [symbol] |
| | | | [symbol] |
| | | | [symbol] |
| | X4 | S239D/H268D/L328Y/ | [symbol] |
| | | I332E | [symbol] |
| | | | [symbol] |
| | X2-K | G236D/H268D/K322A | [symbol] |
| | | | [symbol] |
| | | | [symbol] |
| | X3-K | S239D/H268D/K322A | [symbol] |
| | | | [symbol] |
| | | | [symbol] |
| | X4-K | S239D/H268D/K322A/ | [symbol] |
| | | L328Y/I332E | [symbol] |
| | | | [symbol] |
| | X2-KE | G236D/H268D/E293A/ | [symbol] |
| | | K322A | [symbol] |
| | | | [symbol] |
| | X3-KE | S239D/H268D/E293A/ | [symbol] |
| | | K322A | [symbol] |
| | | | [symbol] |
| | X2-KS | G236D/S267G/H268D/ | [symbol] |
| | | K322A | [symbol] |
| | | | [symbol] |
| | X3-KS | S239D/S267G/H268D/ | [symbol] |
| | | K322A | [symbol] |
| | | | [symbol] |
| | X3-KSL | S239D/S267G/H268D/ | [symbol] |
| | | L328Y/K322A | [symbol] |
| | | | [symbol] |
| | X3-KSI | S239D/S267G/H268D/ | [symbol] |
| | | K322A/I332E | [symbol] |
| | | | [symbol] |
| | X3-KL | S239D/H268D/L328Y/ | [symbol] |
| | | K322A | [symbol] |
| | | | [symbol] |
| | X3-KI | S239D/H268D/K322A/ | [symbol] |
| | | I332E | [symbol] |
| | | | [symbol] |
| | X4-KS | S239D/S267G/H268D/ | [symbol] |
| | | K322A/L328Y/I332E | [symbol] |
| | | | [symbol] |
| IgG4- | IgG4 (WT) | — | [symbol] |
| type | | | [symbol] |
| | | | [symbol] |
| | IgG4-S228P | S228P | [symbol] |
| | | | [symbol] |
| | | | [symbol] |
| | X2-P | S228P/G236D/Q268D | [symbol] |
| | | | [symbol] |
| | | | [symbol] |
| | X3-P | S228P/S239D/Q268D | [symbol] |
| | | | [symbol] |
| | | | [symbol] |
| | X4-P | S228P/S239D/Q268D/ | [symbol] |
| | | L328Y/I332E | [symbol] |
| | | | [symbol] |

[symbol]

indicates data missing or illegible when filed

[0103] The antibody of the present invention may advantageously be one which has a high ratio of monomers having a four-chain structure consisting of two light chains and two heavy chains. Monomer ratio may be measured by SEC-HPLC (see Example described later). Monomer ratio is preferably at least 80%, more preferably at least 90%.

[0104] The antibody of the present invention may further undergo functional modifications, such as introduction of amino acid mutations other than those described above, subclass substitution, sugar chain modification, etc.

[0105] The antibody of the present invention preferably has an ADCC activity higher than that of IgG1 or IgG1-K322A in which the same Fv region is employed. Compared to antibodies with low ADCC activity, antibodies with high ADCC activity exhibit a high suppressive action on antigen-stimulated T cells. ADCC activity may be examined as follows: for example, in a system using Fc receptor expressing gene-modified Jurkat T cells instead of effector cells, signals from the Fc receptors activate the luciferase gene integrated downstream of NFAT response sequence to thereby generate luciferase, which is then quantified with a luminometer (see Example described later).

[0106] The antibody of the present invention preferably comprises a variable region in which each of the Fab regions of a heavy chain and a light chain of an antibody (showing PD-1 agonist activity) derived from a non-human animal (e.g., mouse) has been humanized, and the Fc region of an Fc region-modified form of human IgG1 or IgG4. Exemplary amino acid sequences of the heavy chain and the light chain of preferable antibodies of the present invention and examples of nucleic acid sequences encoding those amino acid sequences are shown in Table V below. The antibody of the present invention may be one which has the heavy chain sequence and/or the light chain amino acid sequence as shown in Table V below. In the antibody of the present invention, the heavy chain and the light chain thereof may comprise an amino acid sequence having at least 90%, 90-95%, 95-99% or more than 99% identity with the amino acid sequence as shown in Table V below. Further, nucleotides encoding the antibody of the present invention may also be nucleotides encoding these heavy chain and light chain amino acid sequences, and such nucleotides may be altered from the nucleotide sequences as shown in Table V depending on the amino acid sequence of interest. The designing of nucleotide sequences in accordance with the amino acid sequences of interest is known to one of ordinary skill in the art, and it is desirable that nucleotide sequences (codons) encoding individual amino acids be optimized in accordance with the amino acid sequences of interest.

[0107] Examples of the antibody of the present invention include HM242-C3-X3-K, HM242-C3-X3-KE, HM242-C3-X3-KI, HM242-C3-X3-KSI, HM242-C3-X4-K, HM242-D3-X3-K, HM242-D3-X3-KE, HM242-D3-X3-KI, HM242-D3-X3-KS, HM242-D3-X3-KSI, HM242-D3-X4-K, HM268-K8-X3-K, HM268-K8-X3-KE, HM268-K8-X3-KI, HM268-K8-X3-KS, HM268-K8-X3-KSI and HM268-K8-X4-K. HM242-C3-X3-KI, HM242-C3-X3-KSI, HM242-D3-X3-KI, HM242-D3-X3-KS, HM242-D3-X3-KSI, HM268-K8-X3-KI, HM268-K8-X3-KS and HM268-K8-X3-KSI are preferred, with HM242-D3-X3-KS, HM268-K8-X3-KI, HM268-K8-X3-KS and HM268-K8-X3-KSI being the most preferred.

TABLE V

| | | | Seq. | | Seq. |
|---|---|---|---|---|---|
| | | Amino Acid Sequence | ID | DNA Sequence | ID |
| mouse | Heavy | QVQLQQSGPELVKPGASVKMSCK | 69 | caggtgcaactccagcagtctggtcccgaattggtgaaacctggtgcctcagtcaagatgtcttg | 70 |
| HM242 | Chain | ASGYTFTSYYIQWVKQRPGQGLE | | caaagcatcagggtatacgtttacctcctactacatccagtgggtgaaacagaggccaggacagg | |
| | | WIGWIYPGQGTTKYNEKFKGKTT | | gccttgagtggattggctggatttatcccggagatggcacaaccaagtacaacgagaagttcaag | |
| | | LTIDKSSRTAYMLFNSLTSEDSG | | ggcaaaaccacactgactatcgacaagagctccagaactgcctacatgctcttcsattccctgac | |
| | | IYFCASYYGSYFDYWGQGTTLTV | | aagcgaagatagtggcatctacttttgtgccagctactatgggagctatttcgactattggggtc | |
| | | SSAKTTAPSVYPLAPVQGDITGS | | aagggaccactctgaccgtatcctctgcgaaaactactgccccatcagtctatccccttgctccc | |
| | | SVTLGCLVKGYFPEPVTLTWNSG | | gtctgcggtgataccacgggttcctctgtgactcttggttgtctggttaaagggtattttcccga | |
| | | SLSSGVHTFPAVLQSDLYTLSSS | | accagtcaccctcacatggaatagcgggagcctctcaagtggagtgcacacctttcctgccgtcc | |
| | | VTVTSSTWPSQSITQNVAHPASS | | tgcaatctgacctttacacactttcttcaagcgtgaccgtgacaagtagcacttggccctctcag | |
| | | TKVDKKIEPRGPTIKPCPPCKCP | | tccattacttgcaatgttgcacatccagcatcaagtacaaaggtggataagaaaatcgaacccag | |
| | | APNLLGGPSVFIFPPKIKDVLMI | | gggcccaaccatcaaaccctgtccgccatgtaaatgccctgctccaaatctcctgggcggaccta | |
| | | SLSPIVTCVVVDVSEDDPDVQIS | | gtgtgttcatctttcctcccaaaatcaaagatgtgctgatgatcagtctgagcccaatagtgacc | |
| | | WFVNNVEVHTAQTQTHREDYNST | | tgtgtggtagtggacgtttccgaggatgaccctgacgtccagataagctggtttgtcaacaatgt | |
| | | LRVVSALPIQHQDWMSGKEFKCK | | ggaagtgcacacagcccaaacacagacccatcgcgaggactataactccaccctgagggttgtga | |
| | | VNNKDLPAPIERTISKPKGSVRA | | gcgcactgcccattcagcaccaggactggatgagtgggaaggagttcaaatgcaaggtaaataac | |
| | | PQVYVLPPPEEEMTKKQVTLTCM | | aaggatctgcccgccccgattgaacggactatcagcaaaccgaaggggtccgttagagcacctca | |
| | | VTDFMPEDIYVEWTNNGKTELNY | | ggtatacgtgttgccacctccagaggaggaaatgaccaagaaacaggttaccctgacatgcatgg | |
| | | KNTEPVLDSDGSYFMYSKLRVEK | | taacggacttcatgcctgaggacatttacgtggagtggacgaataacggcaaaaccgagctgaac | |
| | | KNWVERNSYSCSVVHEGLHNHHT | | tacaagaacactgagcctgtcctcgattccgatggctcctatttcatgtactctaagctcagagt | |
| | | TKSFSRTPGK | | ggaaaagaagaactgggtggaacgcaatagctactcttgctcagtggtccatgagggcttgcaca | |
| | | | | atcatcacactactaagtcattctctcggacacccggaaag | |
| | Light | DIQMTQTTSSLSASLGDRVTISC | 71 | gacattcagatgacccagacaacaagctccctttccgccagtcttggcgatcgggtgaccatcag | 72 |
| | Chain | RASQDISNYLNWYQQKPDGTVTL | | ctgtagagcctcacaagacatctctaactacctgaactggtatcagcagaaacctgatggcacag | |
| | | LIYYTSKLHSGVPSRFSGSGSGT | | tcactctgctgatctactacaccagcaaactccactctggtgtgccatctcgcttttcagggagt | |
| | | DYSLTITNLEQKDFATYFCQQSS | | ggatctggcactgactattccctgaccatcaccaatctcgaacagaaggactttgccacgtattt | |
| | | TLPFTFGGGTKLEIKRADAAPTV | | ctgccaacagtccagtaccttgcccttcacatttggtggagggacaaagttggagataaagcgag | |
| | | SIFPPSSEQLTSGGASVVCFLNN | | ctgatgcagcaccaactgtctccatcttccctcctagcagtgaacagctgactagtggaggagcc | |
| | | FYPKDINVKWKIDGSERQNGVLN | | tctgtggtgtgtttcctcaacaacttctaccccaaagacatcaatgtcaagtggaagatcgatgg | |
| | | SWTDQDSKDSTYSMSSTLTLTKD | | gtcagaacgtcaaaatggcgtgctgaatagctggacagatcaggatagcaaggactccacttact | |
| | | EYERHNSYTCEATHKTSTSPIVK | | caatgagctcaacactgacactgaccaaagacgagtatgagaggcataacagctatacgtgtgaa | |
| | | SFNRNEC | | gccacacacaagaccagcacatcaccgattgtgaagagcttcaatcggaatgagtgc | |
| mouse | Heavy | QVGLQQSGPELVKPGASVKMSCK | 73 | caggtccagctgcagcaaagtggaccagaactggttaaacccggcgcaagtgtgaagatgagctg | 74 |
| HM266 | Chain | ASGYTFTSYYIQWVKQRPGQGLE | | taaggcttcagggtatacatttaccagctactacatccagtgggtaaagcagcgacctggtcaag | |
| | | WIGWIYPGDGSSKYNEKFKGKTT | | gcctggagtggatagggtggatttatccgggagatggatccagcaaatataacgagaagttcaag | |
| | | LTADKSSSTAYMLLSSLTSEDSG | | ggcaagaccacactgacggccgacaaatctagctcaacggcctacatgctgctcagctccttgac | |
| | | IYFCASYYGSSFDYWGQGTTLTV | | ttccgaagattctgggatttacttctgcgcttcctactatggctctagcttcgactattggggcc | |
| | | SSAKTTAPSVYPLAPVCGQTTGS | | aaggtaccacattgacagtcagctccgcgaaaactactgccccatcagtctatccccttgctccc | |
| | | SVTLGCLVKGYFPEPVTLTWNSG | | gtctgcggtgataccacgggttcctctgtgactcttggttgtctggttaaagggtattttcccga | |
| | | SLSSGVHTFPAVLQSDLYTLSSS | | accagtcaccctcacatggaatagcgggagcctctcaagtggagtgcacacctttcctgccgtcc | |
| | | VTVTSSTWPSQSITQNVAHPASS | | tgcaatctgacctttacacactttcttcaagcgtgaccgtgacaagtagcacttggccctctcag | |
| | | TKVDKKIEPRGPTIKPQPPCKCP | | tccattacttgcaatgttgcacatccagcatcaagtacaaaggtggataagaaaatcgaacccag | |
| | | APNLLGGPSVFIFPPKIKDVLMI | | gggcccaaccatcaaaccctgtccgccatgtaaatgccctgctccaaatctcctgggcggaccta | |
| | | SLSPIVTCVVVDVSEDDPQVQIS | | gtgtgttcatctttcctcccaaaatcaaagatgtgctgatgatcagtctgagcccaatagtgacc | |
| | | WFVNNVEVHTAQTQTHREDYNST | | tgtgtggtagtggacgtttccgaggatgaccctgacgtccagataagctggtttgtcaacaatgt | |
| | | LRVVSALPIQHQDWMSGKEFKCK | | ggaagtgcacacagcccaaacacagacccatcgcgaggactataactccaccctgagggttgtga | |
| | | VNNKDLPAPIERTISKPKGSVRA | | gcgcactgcccattcagcaccaggactggatgagtgggaaggagttcaaatgcaaggtaaataac | |
| | | PQVYVLPPPEEEMTKKQVTLTCM | | aaggatctgcccgccccgattgaacggactatcagcaaaccgaaggggtccgttagagcacctca | |
| | | VTDFMPEDIYVEWTNNGKTELNY | | ggtatacgtgttgccacctccagaggaggaaatgaccaagaaacaggttaccctgacatgcatgg | |
| | | KNTEPVLDSDGSYFMYSKLRVEK | | taacggacttcatgcctgaggacatttacgtggagtggacgaataacggcaaaaccgagctgaac | |
| | | KNWVERNSYSCSVVHEGLHNHHT | | tacaagaacactgagcctgtcctcgattccgatggctcctatttcatgtactctaagctcagagt | |
| | | TKSFSRTPGK | | ggaaaagaagaactgggtcgaacgcaatagctactcttgctcagtggtccatgagggcttgcaca | |
| | | | | atcatcacactactaagtcattctctcggacacccggaaag | |
| | Light | DIQMTQTTSSLSASLGDRVTISC | 75 | gacattcagatgactcagaccacgtcctccttgtccgcctctttgggagatcgcgttaccatctc | 76 |
| | Chain | RASQDISNYLNWYQQKPDGTVKF | | ttgcagagcatctcaggatattagcaactacctgaactggtatcagcagaaacccgatgggacgg | |
| | | LIYYSSRLHSGVPSRFSGSGSGT | | tgaagttcctcatctactattcctccagacttcactctggggtaccatcacggtttagtggcagt | |
| | | DYSLTISNLEQEDIATYFCQQGS | | ggtagcggcaccgactactctctcaccatttccaaccttgaacaggaggacatagccacctactt | |
| | | TLPFTFGGGTKLEIKRADAAPTV | | ttgccaacaagggagcactctgccctttacatttggcggaggtaccaaactggagatcaaacgag | |
| | | SIFPPSSEQLTSGGASVVCFLNN | | ctgatgcagcaccaactgtctccatcttccctcctagcagtgaacagctgactagtggaggagcc | |
| | | FYPKDINVKWKIDGSERQNGVLN | | tctgtggtgtgtttcctcaacaacttctaccccaaagacatcaatgtcaagtggaagatcgatgg | |
| | | SWTDQDSKDSTYSMSSTLTLTKD | | gtcagaacgtcaaaatggcgtgctgaatagctggacagatcaggatagcaaggactccacttact | |
| | | EYERHNSYTCEATHKTSTSPIVK | | caatgagctcaacactgacactgaccaaagacgagtatgagaggcataacagctatacgtgtgaa | |
| | | SFNRNEC | | gccacacacaagaccagcacatcaccgattgtgaagagcttcaatcggaatgagtgc | |
| mouse | Heavy | QVQLQQSGPELVKPGASVKMPCK | 77 | caggttcagctgcagcagagtggtcccgaacttgtgaaacctggtgcctctgtgaaaatgccctg | 78 |
| HM268 | Chain | TSGYTFTSYYIQWLKQRPGQGLE | | taagacctctggatacaccttcacaagctactacatacagtggctgaaacagaggccaggacaag | |
| | | WIGWIYFGDASTKYNEKFKGKTT | | gcttggaatggattggctggatctactttggggatgccagtaccaagtacaacgagaagttcaag | |
| | | LTADKSSSTAYMLLSSLTSEDSG | | gggaaaaccacactgacagctgacaagtctagcagtacggcctatatgctgctctcaagcctcac | |
| | | IYFGASYYGSYFDYWGQGTTLTV | | ttctgaggattcaggcatctacttttgcgcctcctattatggctcctatttcgactattggggtc | |
| | | SSAKTTAPSVYPLAPVCGQTTGS | | aagggactaccttgacagtctccagcgcgaaaactactgccccatcagtctatccccttgctccc | |
| | | SVTLGCLVKGYFPEPVTLTWNSG | | gtctgcggtgataccacgggttcctctgtgactcttggttgtctggttaaagggtattttcccga | |
| | | SLSSGVHTFPAVLQSDLYTLSSS | | accagtcaccctcacatggaatagcgggagcctctcaagtggagtgcacacctttcctgccgtcc | |
| | | VTVISSTWPSQSITCNVANPASS | | tgcaatctgacctttacacactttcttcaagcgtgaccgtgacaagtagcacttggccctctcag | |
| | | TKVDKKIEPRGPTIKPCPPCKCP | | tccattacttgcaatgttgcacatccagcatcaagtacaaaggtggataagaaaatcgaacccag | |
| | | APNLLGGPSVFIFPPKIKDVLMI | | gggcccaaccatcaaaccctgtccgccatgtaaatgccctgctccaaatctcctgggcggaccta | |
| | | SLSPIVTCVVVDVSEDDPDVQIS | | gtgtgttcatctttcctcccaaaatcaaagatgtgctgatgatcagtctgagcccaatagtgacc | |
| | | WFVNNVEVHTAQTQTHREDYNST | | tgtgtggtagtggacgtttccgaggatgaccctgacgtccagataagctggtttgtcaacaatgt | |
| | | LRVVSALPIQHQDWMSGKEFKCK | | ggaagtgcacacagcccaaacacagacccatcgcgaggactataactccaccctgagggttgtga | |
| | | VNNKDLPAPIERTISKPKGSVRA | | gcgcactgcccattcagcaccaggactggatgagtgggaaggagttcaaatgcaaggtaaataac | |
| | | PQVYVLPPPEEEMTKKQVTLTCM | | aaggatctgcccgccccgattgaacggactatcagcaaaccgaaggggtccgttagagcacctca | |
| | | VTDFMPEDIYVEWTNNGKTELNY | | ggtatacgtgttgccacctccagaggaggaaatgaccaagaaacaggttaccctgacatgcatgg | |
| | | KNTEPVLDSDGSYFMYSKLRVEK | | taacggacttcatgcctgaggacatttacgtggagtggacgaataacggcaaaaccgagctgaac | |
| | | KNWVERNSYSCSVVHEGLHNHHT | | tacaagaacactgagcctgtcctcgattccgatggctcctatttcatgtactctaagctcagagt | |
| | | TKSFSRTPGK | | ggaaaagaagaactgggtggaacgcaatagctactcttgctcagtggtccatgagggcttgcaca | |
| | | | | atcatcacactactaagtcattctctcggacacccggaaag | |
| | Light | NIQMTQNTSSLSATLGVRVTISC | 79 | aacattcagatgacccagaataccagctccttgagtgccacattgggcgtgagagtgaccatctc | 80 |
| | Chain | RASQDISNYLNWYQQKPDGTVKL | | atgtcgagcctctcaggacatcagcaattacctgaactggtatcagcagaaacctgatgggacag | |
| | | LIYSTSRLHSGIPSRFSGSGSGT | | tcaagctgctcatctactccacttctcgccttcattccgggattcccagtcgtttctctggctct | |
| | | DYSLTISNLEQEDIATYFCQQGS | | ggatcaggcactgactattcccttaccatcagtaacctggaacaagaggacatagccacgtactt | |
| | | TLPFTFGGGTKLEIKRADAAPTV | | ttgccagcaaggtagcactctcccattcacctttggaggtggcacaaagctggagatcaaacgag | |
| | | SIFPPSSEQLTSGGASVVCFLNN | | ctgatgcagcaccaactgtctccatcttccctcctagcagtgaacagctgactagtggaggagcc | |
| | | FYPKDINVKWKIDGSERQNGVLN | | tctgtggtgtgtttcctcaacaacttctaccccaaagacatcaatgtcaagtggaagatcgatgg | |
| | | SWTDQDSKDSTYSMSSTLTLTKD | | gtcagaacgtcaaaatggcgtgctgaatagctggacagatcaggatagcaaggactccacttact | |
| | | EYERHNSYTCEATHKTSTSPIVK | | caatgagctcaacactgacactgaccaaagacgagtatgagaggcataacagctatacgtgtgaa | |
| | | SFNRNEC | | gccacacacaagaccagcacatcaccgattgtgaagagcttcaatcggaatgagtgc | |
| mouse | Heavy | EVLLQQSGPELVKPGASVKIPCK | 81 | gaagtgctgttgcagcagtcaggtcctgaactcgtcaaaccaggagcatccgtgaagattccctg | 82 |
| HM297 | Chain | ASGYTFTDYNVDWVRQSHGKSLE | | taaggcttctgggtataccttcaccgactacaacgtggattgggttcggcagtctcacggcaaaa | |
| | | WIGDIDPNNGGTIYNQKFKDKAT | | gtctggagtggattggcgacatagatcccaataatggcggaaccatctacaaccagaagttcaag | |
| | | LTVDKSSRTAYMELRSLTSEDTA | | gacaaagccaccctgactgtggacaagtctagccgaacagcctacatggagcttcgcagtctgac | |
| | | VYYCARWRGAMDYWGQGTSVTVS | | ttccgaggatactgccgtctactattgcgcacgttggagaggagccatggactattggggccaag | |
| | | SAKTTAPSVYPLAPVCGDTTGSS | | ggacctcagtgacggttagctccgcgaaaactactgccccatcagtctatccccttgctcccgtc | |
| | | VTLGCLVKGYFPEPVTLTWNSGS | | tgcggtgataccacgggttcctctgtgactcttggttgtctggttaaagggtattttcccgaacc | |
| | | LSSGVHTFPAVLQSDLYTLSSSV | | agtcaccctcacatggaatagcgggagcctctcaagtggagtgcacacctttcctgccgtcctgc | |
| | | TVTSSTWPSQSITQNVAHPASST | | aatctgacctttacacactttcttcaagcgtgaccgtgacaagtagcacttggccctctcagtcc | |
| | | KVDKKIEPRGPTIKPCPPCKCPA | | attacttgcaatgttgcacatccagcatcaagtacaaaggtggataagaaaatcgaacccagggg | |
| | | PNLLGGPSVFIFPPKIKDVLMIS | | cccaaccatcaaaccctgtccgccatgtaaatgccctgctccaaatctcctgggcggacctagtg | |
| | | LSPIVTCVVVDVSEDDPDVQISW | | tgttcatctttcctcccaaaatcaaagatgtgctgatgatcagtctgagcccaatagtgacctgt | |
| | | FVNNVEVHTAQTQTHREDYNSTL | | gtggtagtggacgtttccgaggatgaccctgacgtccagataagctggtttgtcaacaatgtgga | |
| | | RVVSALPIQHQDWMSGKEFKCKV | | agtgcacacagcccaaacacagacccatcgcgaggactataactccaccctgagggttgtgagcg | |
| | | NNKDLPAPIERTISKPKGSVRAP | | cactgcccattcagcaccaggactggatgagtgggaaggagttcaaatgcaaggtaaataacaag | |
| | | QVYVLPPPEEEMTKKQVTLTCMV | | gatctgcccgccccgattgaacggactatcagcaaaccgaaggggtccgttagagcacctcaggt | |
| | | TDFMPEDIYVEWTNNGKTELNYK | | atacgtgttgccacctccagaggaggaaatgaccaagaaacaggttaccctgacatgcatggtaa | |
| | | NTEPVLDSDGSYFMYSKLRVEKK | | cggacttcatgcctgaggacatttacgtggagtggacgaataacggcaaaaccgagctgaactac | |
| | | NWVERNSYSCSVVHEGLHNHHTT | | aagaacactgagcctgtcctcgattccgatggctcctatttcatgtactctaagctcagagtgga | |
| | | KSFSRTPGK | | aaagaagaactgggtggaacgcaatagctactcttgctcagtggtccatgagggcttgcacaatc | |
| | | | | atcacactactaagtcattctctcggacacccggaaag | |
| | Light | DVQMTQTTSSLSASLGDRVTISC | 83 | gatgtgcagatgacacagaccacatctagccttagtgcctcattgggcgatagagtgaccatttc | 84 |
| | Chain | RASQDIDNYLKWYQQKPDGTVKL | | ctgtcgtgcctcccaagacatcgacaactacctgaagtggtatcagcagaaacccgatggcactg | |
| | | LIYDTSRLHSGVPSRFSGSGSGT | | tcaagctgctgatctacgacacatcacggttgcacagtggggtaccttcccgcttttctggcagc | |
| | | DYSLTISNLKQEDIATYFCQQGY | | ggatctggtaccgactatagcctgactatctccaatctgaagcaggaggacattgccacctactt | |
| | | TLPWTFGGGTRLEIKRADAAPTV | | ctgccagcaaggctatacgctcccatggacttttggaggtggaactcgactcgaaatcaaacgag | |
| | | SIFPPSSEQLTSGGASVVCFLNN | | ctgatgcagcaccaactgtctccatcttccctcctagcagtgaacagctgactagtggaggagcc | |
| | | FYPKDINVKWKIDGSERQNGVLN | | tctgtggtgtgtttcctcaacaacttctaccccaaagacatcaatgtcaagtggaagatcgatgg | |
| | | SWTDQDSKDSTYSMSSTLTLTKD | | gtcagaacgtcaaaatggcgtgctgaatagctggacagatcaggatagcaaggactccacttact | |
| | | EYERHNSYTCEATHKTSTSPIVK | | caatgagctcaacactgacactgaccaaagacgagtatgagaggcataacagctatacgtgtgaa | |
| | | SFNRNEC | | gccacacacaagaccagcacatcaccgattgtgaagagcttcaatcggaatgagtgc | |
| chi- | Heavy | QVQLQQSGPELVKPGASVKMSCK | 85 | caggtgcaactccagcagtctggtcccgaattggtgaaacctggtgcctcagtcaagatgtcttg | 86 |
| meric | Chain | ASGYTFTSYYIQWVKQRPGQGLE | | caaagcatcagggtatacgtttacctcctactacatccagtgggtgaaacagaggccaggacagg | |
| HM242- | | WIGWIYPGDGTTKYNEKFKGKTT | | gccttgagtggattggctggatttatcccggagatggcacaaccaagtacaacgagaagttcaag | |
| IgG1- | | LTIDKSSRTAYMLFNSLTSEDSG | | ggcaaaaccacactgactatcgacaagagctccagaactgcctacatgctcttcaattccctgac | |
| K322A | | IYFCASYYGSYFDYWGQGTTLTV | | aagcgaagatagtggcatctacttttgtgccagctactatgggagctatttcgactattggggtc | |
| | | SSASTKGPSVFPLAPSSKSTSGG | | aagggaccactctgaccgtatcctctgcgtcgaccaagggcccctccgtgttccccctggccccc | |
| | | TAALGCLVKDYFPEPVTVSWNSG | | tcctccaagtccacctccggcggcaccgccgccctgggctgcctggtgaaggactacttccccga | |
| | | ALTSGVHTFPAVLQSSGLYSLSS | | gcccgtgaccgtgtcctggaactccggcgccctgacctccggcgtgcacaccttccccgccgtgc | |
| | | VVTVPSSSLGTQTYICNVNHKPS | | tccagtcctccggcctgtactccctgtcctccgtggtgaccgtgccctcctcctccctgggcacc | |
| | | NTKVDKKVEPKSCDKTHTCPPCP | | cagacctacatctgcaacgtgaaccacaagccctccaacaccaaggtggacaagaaggtcgagcc | |
| | | APELLGGPSVFLFPPKPKQTLMI | | caagtcctgcgacaagacccacacctgccccccctgccccgcccccgagctgctgggcggcccct | |
| | | SRTPEVTCVVVDVSHEDPEVKFN | | ccgtgttcctgttcccccccaagcccaaggacaccctgatgatctccaggacccccgaggtgacc | |
| | | WYVDGVEVHNAKTKPREEQYNST | | tgcgtggtggtggacgtgtcccacgaggaccccgaggtgaagttcaactggtacgtggacggcgt | |
| | | YRVVSVLTVLHQDWLNGKEYKCA | | ggaggtgcacaacgccaagaccaagcccagggaggagcagtacaactccacctacagggtggtgt | |
| | | VSNKALPAPIEKTISKAKGQPRE | | ccgtgctgaccgtgctgcaccaggactggctgaacggcaaggagtacaagtgcgccgtgtccaac | |
| | | PQVYTLPPSRDELTKNQVSLTCL | | aaggccctgcccgcccccatcgagaagaccatctccaaggccaagggccagcccagggagcccca | |
| | | VKGFYPSDIAVEWESNGQPENNY | | ggtgtacaccctgcccccctccagggacgagctgaccaagaaccaggtgtccctgacctgcctgg | |
| | | KTTPPVLDSDGSFFLYSKLTVDK | | tgaagggcttctacccctccgacatcgccgtggagtgggagtccaacggccagcccgagaacaac | |
| | | SRWQQGNVFSCSVMHEALHNHYT | | tacaagaccaccccccccgtgctggactccgacggctccttcttcctgtactccaagctgaccgt | |
| | | QKSLSLSPGK | | ggacaagtccaggtggcagcagggcaacgtgttctcctgctccgtgatgcacgaggccctgcaca | |
| | | | | accactacacccagaagtccctgtccctgtcccccggcaag | |
| | Light | DIQMTQTTSSLSASLGDRVTISC | 87 | gacattcagatgacccagacaacaagctccctttccgccagtcttggcgatcgggtgaccatcag | 88 |
| | Chain | RASQDISNYLNWYQQKPDGTVTL | | ctgtagagcctcacaagacatctctcactacctgaactggtatcagcagaaacctgatggcacag | |
| | | LIYYTSKLHSGVPSRFSGSGSGT | | tcactctgctgatctactacaccagcaaactccactctggtgtgccatctcgcttttcagggagt | |
| | | DYSLTIINLEQKDFATYFCQQSS | | ggatctggcactgactattccctgaccatcaccaatctcgaacagaaggactttgccacgtattt | |
| | | TLPFTFGGGTKLEIKRTVAAPSV | | ctgccaacagtccagtaccttgcccttcacatttggtggagggacaaagttggagataaagcgaa | |
| | | FIFPPSDEQLKSGTASVVCLLNN | | ctgtagccgcaccaagcgtgttcatctttccgccatccgatgaacagctgaagtcaggcacagcg | |
| | | FYPREAKVQWKVDNALQSGNSQE | | tcagttgtctgtctcctcaacaacttctaccccagagaggccaaagtgcagtggaaagtggacaa | |
| | | SVTEQDSKDSTYSLSSTLTLSKA | | tgccctgcagtcaggcaattctcaggaatctgtgacagagcaggactccaaagacagtacctata | |
| | | DYEKHKVYACEVTHQGLSSPVTK | | gcctgtctagcacactgacgctctctaaggccgactatgagaagcacaaggtctatgcctgtgaa | |
| | | SFNRGEC | | gtgacacatcaagggctgagcagtccagtcactaagagcttcaatcgtggggaatgc | |
| chi- | Heavy | QVQLQQSGPELVKPGASVKMSCK | 89 | caggtccagctgcagcaaagtggaccagaactggttaaacccggcgcaagtgtgaagatgagctg | 90 |
| meric | Chain | ASGYTFTSYYIQWVKQRPGQGLE | | taaggcttcagggtatacatttaccagctactacatccagtgggtaaagcagcgacctggtcaag | |
| HM266- | | WIGWIYPGQGSSKYNEKFKGKTT | | gcctggagtggatagggtggatttatccgggagatggatccagcaaatataacgagaagttcaag | |
| IgG1- | | LTADKSSSTAYMLLSSLTSEDSG | | ggcaagaccacactgacggccgacasatctagctcaacggcctacatgctgctcagctccttgac | |
| K322A | | IYFCASYYGSSFDYWGQGTTLTV | | ttccgaagattctgggatttacttctgcgcttcctactatggctctagcttcgactattggggcc | |
| | | SSASTKGPSVFPLAPSSKSTSGG | | aaggtaccacattgacagtcagctccgcgtcgaccaagggcccctccgtgttccccctggccccc | |
| | | TAALGCLVKDYFPEPVTVSWNSG | | tcctccaagtccacctccggcggcaccgccgccctgggctgcctggtgaaggactacttccccga | |
| | | ALTSGVHTFPAVLQSSGLYSLSS | | gcccgtgaccgtgtcctggaactccggcgccctgacctccggcgtgcacaccttccccgccgtgc | |
| | | VVTVPSSSLGTQTYICNVNHKPS | | tccagtcctccggcctgtactccctgtcctccgtggtgaccgtgccctcctcctccctgggcacc | |
| | | NTKVDKKVEPKSCDKTHTCPPCP | | cagacctacatctgcaacgtgaaccacaagccctccaacaccaaggtggacaagaaggtcgagcc | |
| | | APELLGGPSVFLFPPKPKDTLMI | | caagtcctgcgacaagacccacacctgccccccctgccccgcccccgagctgctgggcggcccct | |
| | | SRTPEVTCVVVDVSHEDPEVKFN | | ccgtgttcctgttcccccccaagcccaaggacaccctgatgatctccaggacccccgaggtgacc | |
| | | WYVDGVEVHNAKTKPREEQYNST | | tgcgtggtggtggacgtgtcccacgaggaccccgaggtgaagttcaactggtacgtggacggcgt | |
| | | YRVVSVLTVLHQDWLNGKEYKCA | | ggaggtgcacaacgccaagaccaagcccagggaggagcagtacaactccacctacagggtggtgt | |
| | | VSNKALPAPIEKTISKAKGQPRE | | ccgtgctgaccgtgctgcaccaggactggctgaacggcaaggagtacaagtgcgccgtgtccaac | |
| | | PQVYTLPPSRDELTKNQVSLTCL | | aaggccctgcccgcccccatcgagaagaccatctccaaggccaagggccagcccagggagcccca | |
| | | VKGFYPSDIAVEWESNGQPENNY | | ggtgtacaccctgcccccctccagggacgagctgaccaagaaccaggtgtccctgacctgcctgg | |
| | | KTTPPVLDSDGSFFLYSKLTVDK | | tgaagggcttctacccctccgacatcgccgtggagtgggagtccaacggccagcccgagaacaac | |
| | | SRWQQGNVFSCSVMHEALHNHYT | | tacaagaccaccccccccgtgctggactccgacggctccttcttcctgtactccaagctgaccgt | |
| | | QKSLSLSPGK | | ggacaagtccaggtggcagcagggcaacgtgttctcctgctccgtgatgcacgaggccctgcaca | |
| | | | | accactacacccagaagtccctgtccctgtcccccggcaag | |
| | Light | DIQMTQTTSSLSASLGDRVTISC | 91 | gacattcagatgactcagaccacgtcctccttgtccgcctctttgggagatcgcgttaccatctc | 92 |
| | Chain | RASQDISNYLNWYQQKPDGTVKF | | ttgcagagcatctcaggatattagcaactacctgaactggtatcagcagaaacccgatgggacgg | |
| | | LIYYSSRLHSGVPSRFSGSGSGT | | tgaagttcctcatctactattcctccagacttcactctggggtaccatcacggtttagtggcagt | |
| | | DYSLTISNLEQEDIATYFCQQGS | | ggtagcggcaccgactactctctcaccatttccaaccttgaacaggaggacatagccacctactt | |
| | | TLPFTFGGGTKLEIKRTVAAPSV | | ttgccaacaagggagcactctgccctttacatttggcggaggtaccaaactggagatcaaacgaa | |
| | | FIFPPSDEQLKSGTASVVQLLNN | | ctgtagccgcaccaagcgtgttcatctttccgccatccgatgaacagctgaagtcaggcacagcg | |
| | | FYPREAKVQWKVDNALQSGNSQE | | tcagttgtctgtctcctcaacaacttctaccccagagaggccaaagtgcagtggaaagtggacaa | |
| | | SVTEQDSKDSTYSLSSTLTLSKA | | tgccctgcagtcaggcaattctcaggaatctgtgacagagcaggactccaaagacagtacctata | |
| | | DYEKHKVYACEVTHQGLSSPVTK | | gcctgtctagcacactgacgctctctaaggccgactatgagaagcacaaggtctatgcctgtgaa | |
| | | SFNRGEC | | gtgacacatcaagggctgagcagtccagtcactaagagcttcaatgtggggaatgc | |
| chi- | Heavy | QVQLQQSGPELVKPGASVKMPCK | 93 | caggttcagctgcagcagagtggtcccgaacttgtgaaacctggtgcctctgtgaaaatgccctg | 94 |
| meric | Chain | TSGYTFTSYYIQWLKQRPGQGLE | | taagacctctggatacaccttcacaagctactacatacagtggctgaaacagaggccaggacaag | |
| HM268- | | WIGWIYFGDASTKYNEKFKGKTT | | gcttggaatggattggctggatctactttggggatgccagtaccaagtacaacgagaagttcaag | |
| IgG1- | | LTADKSSSTAYMLLSSLTSEDSG | | gggaaaaccacactgacagctgacaagtctagcagtacggcctatatgctgctctcaagcctcac | |
| K322A | | IYFCASYYGSYFDYWGQGTTLTV | | ttctgaggattcaggcatctacttttgcgcctcctattatggctcctatttcgactattggggtc | |
| | | SSASTKGPSVFPLAPSSKSTSGG | | aagggactaccttgacagtctccagcgcgtcgaccaagggcccctccgtgttccccctggccccc | |
| | | TAALGQLVKDYFPEPVTVSWNSG | | tcctccaagtccacctccggcggcaccgccgccctgggctgcctggtgaaggactacttccccga | |
| | | ALTSGVHTFPAVLQSSGLYSLSS | | gcccgtgaccgtgtcctggaactccggcgccctgacctccggcgtgcacaccttccccgccgtgc | |
| | | VVTVPSSSLGTQTYICNVNHKPS | | tccagtcctccggcctgtactccctgtcctccgtggtgaccgtgccctcctcctccctgggcacc | |
| | | NTKVDKKVEPKSCDKTHTCPPCP | | cagacctacatctgcaacgtgaaccacaagccctccaacaccaaggtggacaagaaggtcgagcc | |
| | | APELLGGPSVFLFPPKPKDTLMI | | caagtcctgcgacaagacccacacctgccccccctgccccgcccccgagctgctggcgggcccct | |
| | | SRTPEVTCVVVDVSHEDPEVKFN | | ccgtgttcctgttcccccccaagcccaaggacaccctgatgatctccaggacccccgaggtgacc | |
| | | WYVDGVEVHNAKTKPREEQYNST | | tgcgtggtggtggacgtgtcccacgaggaccccgaggtgaagttcaactggtacgtggacggcgt | |
| | | YRVVSVLTVLHQDWLNGKEYKCA | | ggaggtgcacaacgccaagaccaagcccagggaggagcagtacaactccacctacagggtggtgt | |
| | | VSNKALPAPIEKTISKAKGQPRE | | ccgtgctgaccgtgctgcaccaggactggctgaacggcaaggagtacaagtgcgccgtgtccaac | |
| | | PQVYTLPPSRDELTKNQVSLTCL | | aaggccctgcccgcccccatcgagaagaccatctccaaggccaagggccagcccagggagcccca | |
| | | VKGFYPSDIAVEWESNGQPENNY | | ggtgtacaccctgcccccctccagggacgagctgaccaagaaccaggtgtccctgacctgcctgg | |
| | | KTTPPVLDSDGSFFLYSKLTVDK | | tgaagggcttctacccctccgacatcgccgtggagtgggagtccaacggccagcccgagaacaac | |
| | | SRWQQGNVFSCSVMHEALHNHYT | | tacaagaccaccccccccgtgctggactccgacggctccttcttcctgtactccaagctgaccgt | |
| | | QKSLSLSPGK | | ggacaagtccaggtggcagcagggcaacgtgttctcctgctccgtgatgcacgaggccctgcaca | |
| | | | | accactacacccagaagtccctgtccctgtcccccggcaag | |
| | Light | NIQMTQNTSSLSATLGVRVTISC | 95 | aacattcagatgacccagaataccagctccttgagtgccacattgggcgtgagagtgaccatctc | 96 |
| | Chain | RASQDISNYLNWYQQKPDGTVKL | | atgtcgagcctctcaggacatcagcaattacctgaactggtatcagcagaaacctgatgggacag | |
| | | LIYSTSRLHSGIPSRFSGSGSGT | | tcaagctgctcatctactccacttctcgccttcattccgggattcccagtcgtttctctggctct | |
| | | DYSLTISNLEQEDIATYFCQQGS | | ggatcaggcactgactattcccttaccatcagtaacctggaacaagaggacatagccacgtactt | |
| | | TLPFTFGGGTKLEIKRTVAAPSV | | ttgccagcaaggtagcactctcccattcacctttggaggtggcacaaagctggagatcaaacgaa | |
| | | FIFPPSDEQLKSGTASVVCLLNN | | ctgtagccgcaccaagcgtgttcatctttccgccatccgatgaacagctgaagtcaggcacagcg | |
| | | FYPREAKVQWKVDNALQSGNSQE | | tcagttgtctgtctcctcaacaacttctaccccagagaggccaaagtgcagtggaaagtggacaa | |
| | | SVTEQDSKDSTYSLSSTLTLSKA | | tgccctgcagtcaggcaattctcaggaatctgtgacagagcaggactccaaagacagtacctata | |
| | | DYEKHKVYACEVTHQGLSSPVTK | | gcctgtctagcacactgacgctctctaaggccgactatgagaagcacaaggtctatgcctgtgaa | |
| | | SFNRGEC | | gtgacacatcaagggctgagcagtccagtcactaagagcttcaatcgtggggaatg | |
| chi- | Heavy | EVLLQQSGPELVKPGASVKIPCK | 97 | gaagtgctgttgcagcagtcaggtcctgaactcgtcaaaccaggagcatccgtgaagattccctg | 98 |
| meric | Chain | ASGYTFTDYNVDWVRQSHGKSLE | | taaggcttctgggtataccttcaccgactacaacgtggattgggttcggcagtctcacggcaaaa | |
| HM297- | | WIGDIDPNNGGTIYNQKFKDKAT | | gtctggagtggattggcgacatagatcccaataatggcggaaccatctacaaccagaagttcaag | |
| IgG1- | | LTVDKSSRTAYMELRSLTSEDTA | | gacaaagccaccctgactgtggacaagtctagccgaacagcctacatggagcttcgcagtctgac | |
| K322A | | VYYCARWRGAMDYWGQGTSVTVS | | ttccgaggatactgccgtctactattgcgcacgttggagaggagccatggactattggggccaag | |
| | | SASTKGPSVFPLAPSSKSTSGGT | | ggacctcagtgacggttagctccgcgtcgaccaagggcccctccgtgttccccctggccccctcc | |
| | | AALGQLVKDYFPEPVTVSWNSGA | | tccaagtccacctccggcggcaccgccgccctgggctgcctggtgaaggactacttccccgagcc | |
| | | LTSGVHTFPAVLQSSGLYSLSSV | | cgtgaccgtgtcctggaactccggcgccctgacctccggcgtgcacaccttccccgccgtgctcc | |
| | | VTVPSSSLGTQTYICNVNHKPSN | | agtcctccggcctgtactccctgtcctccgtggtgaccgtgccctcctcctccctgggcacccag | |
| | | TKVDKKVEPKSCDKTHTCPPCPA | | acctacatctgcaacgtgaaccacaagccctccaacaccaaggtggacaagaaggtcgagcccaa | |
| | | PELLGGPSVFLFPPKPKDTLMIS | | gtcctgcgacaagacccacacctgccccccctgccccgcccccgagctgctgggcggcccctccg | |
| | | RTPEVTCVVVDVSHEDPEVKFNW | | tgttcctgttcccccccaagcccaaggacaccctgatgatctccaggacccccgaggtgacctgc | |
| | | YVDGVEVHNAKTKPREEQYNSTY | | gtggtggtggacgtgtcccacgaggaccccgaggtgaagttcaactggtacgtggacggcgtgga | |
| | | RVVSVLTVLHQDWLNGKEYKCAV | | ggtgcacaacgccaagaccaagcccagggaggagcagtacaactccacctacagggtggtgtccg | |
| | | SNKALPAPIEKTISKAKGQPREP | | tgctgaccgtgctgcaccaggactggctgaacggcaaggagtacaagtgcgccgtgtccaacaag | |
| | | QVYTLPPSRDELTKNQVSLTCLV | | gccctgcccgcccccatcgagaagaccatctccaaggccaagggccagcccagggagccccaggt | |
| | | KGFYPSDIAVEWESNGQPENNYK | | gtacaccctgcccccctccagggacgagctgaccaagaaccaggtgtccctgacctgcctggtga | |
| | | TTPPVLDSDGSFFLYSKLTVDKS | | agggcttctacccctccgacatcgccgtggagtgggagtccaacggccagcccgagaacaactac | |
| | | RWQQGNVFSCSVMHEALHNHYTQ | | aagaccaccccccccgtgctggactccgacggctccttcttcctgtactccaagctgaccgtgga | |
| | | KSLSLSPGK | | caagtccaggtggcagcagggcaacgtgttctcctgctccgtgatgcacgaggccctgcacaacc | |
| | | | | actacacccagaagtccctgtccctgtcccccggcaag | |
| | Light | DVQMTQTTSSLSASLGDRVTISC | 99 | gatgtgcagatgacacagaccacatctagccttagtgcctcattgggcgatagagtgaccatttc | 100 |
| | Chain | RASQDIDNYLKWYQQKPDGTVKL | | ctgtcgtgcctcccaagacatcgacaactacctgaagtggtatcagcagaaacccgatggcactg | |
| | | LIYDTSRLHSGVPSRFSGSGSGT | | tcaagctgctgatctacgacacatcacggttgcacagtggggtaccttcccgcttttctggcagc | |
| | | DYSLTISNLKQEDIATYFCQQGY | | ggatctggtaccgactatagcctgactatctccaatctgaagcaggaggacattgccacctactt | |
| | | TLPWTFGGGTRLEIKRTVAAPSV | | ctgccagcaaggctatacgctcccatggacttttggaggtggaactcgactcgaaatcaaacgaa | |
| | | FIFPPSDEQLKSGTASVVCLLNN | | ctgtagccgcaccaagcgtgttcatctttccgccatccgatgaacagctgaagtcaggcacagcg | |
| | | FYPREAKVQWKVDNALQSGNSQE | | tcagttgtctgtctcctcaacaacttctaccccagagaggccaaagtgcagtggaaagtggacaa | |
| | | SVTEQDSKDSTYSLSSTLTLSKA | | tgccctgcagtcaggcaattctcaggaatctgtgacagagcaggactccaaagacagtacctata | |
| | | DYEKHKVYACEVTHQGLSSPVTK | | gcctgtctagcacactgacgctctctaaggccgactatgagaagcacaaggtctatgcctgtgaa | |
| | | SFNRGEC | | gtgacacatcaagggctgagcagtccagtcactaagagcttcaatcgtggggaatgc | |
| chi- | Heavy | EVLLQQSGPELVQPGTSVKIFCK | 101 | gaggttctccttcagcagtctggccctgaactggtgcaaccagggactagcgtcaagatcttctg | 102 |
| meric | Chain | ASGYTFTDYNIDWVKQSHGKSHE | | caaagcaagcggatacacgtttaccgactacaacatcgattgggtgaagcagagtcacggcaaat | |
| HM624- | | WIGDIDPNNGGTVYNQKFKGKAT | | cccacgaatggataggggacattgaccccaataatggcggtaccgtgtacaaccagaagttcaag | |
| IgG1- | | LTVDKSSTTAYMELRSLTSEDTA | | ggcaaagccaccctcactgtggataagtcctctaccacagcctatatggagttgcgaagtctgac | |
| K322A | | VYYCTRWRGAMDYWGRGTSVTVS | | ctcagaggatacagccgtgtattactgtactcgctggagaggagccatggactattggggtaggg | |
| | | SASTKGPSVFPLAPSSKSTSGGT | | gaacctccgtcactgtaagctcagcgtcgaccaagggcccctccgtgttccccctggccccctcc | |
| | | AALGCLVKDYFPEPVTVSWNSGA | | tccaagtccacctccggcggcaccgccgccctgggctgcctggtgaaggactacttccccgagcc | |
| | | LTSGVHTFPAVLQSSGLYSLSSV | | cgtgaccgtgtcctggaactccggcgccctgacctccggcgtgcacaccttccccgccgtgctcc | |
| | | VTVPSSSLGTQTYICNVNHKPSN | | agtcctccggcctgtactccctgtcctccgtggtgaccgtgccctcctcctccctgggcacccag | |
| | | TKVDKKVEPKSCDKTHTCPPGPA | | acctacatctgcaacgtgaaccacaagccctccaacaccaaggtggacaagaaggtcgagcccaa | |
| | | PELLGGPSVFLFPPKPKDTLMIS | | gtcctgcgacaagacccacacctgccccccctgccccgcccccgagctgctgggcggcccctccg | |
| | | RTPEVTCVVVDVSHEDPEVKFNW | | tgttcctgttcccccccaagcccaaggacaccctgatgatctccaggacccccgaggtgacctgc | |
| | | YVDGVEVHNAKTKPREEQYNSTY | | gtggtggtggacgtgtcccacgaggaccccgaggtgaagttcaactggtacgtggacggcgtgga | |
| | | RVVSVLTVLHQDWLNGKEYKCAV | | ggtgcacaacgccaagaccaagcccagggaggagcagtacaactccacctacagggtggtgtccg | |
| | | SNKALPAPIEKTISKAKGQPREP | | tgctgaccgtgctgcaccaggactggctgaacggcaaggagtacaagtgcgccgtgtccaacaag | |
| | | QVYTLPPSRDELTKNQVSLTCLV | | gccctgcccgcccccatcgagaagaccatctccaaggccaagggccagcccagggagccccaggt | |
| | | KGFYPSDIAVEWESNGQPENNYK | | gtacaccctgcccccctccagggacgagctgaccaagaaccaggtgtccctgacctgcctggtga | |
| | | TIPPVLDSDGSFFLYSKLTVDKS | | agggcttctacccctccgacatcgccgtggagtgggagtccaacggccagcccgagaacaactac | |
| | | RWQQGNVFSCSVMHEALHNHYTQ | | aagaccaccccccccgtgctggactccgacggctccttcttcctgtactccaagctgaccgtgga | |
| | | KSLSLSPGK | | caagtccaggtggcagcagggcaacgtgttctcctgctccgtgatgcacgaggccctgcacaacc | |
| | | | | actacacccagaagtccctgtccctgtcccccggcaag | |
| | Light | DIQMTQTTSSLSASLGDRVTISC | 103 | gacatccagatgacacagacaaccagctcattgtccgcctctttgggcgatagggtgacaatctc | 104 |
| | Chain | RASQDVSNYLNWYQQKPDGTVKL | | ctgtcgagcctcacaggacgtgtccaattacctgaactggtatcagcagaaacccgatggaacgg | |
| | | LIYDTSKLHSGVPSRFSGSGSGT | | tcaaactgctgatctacgacacctctaagctccactctggcgttccaagccgttttagcggaagt | |
| | | DYSLTIRDPDQEDIATYFCQQGH | | gggagtggtaccgactatagcctcactatcagagatcccgatcaggaggacattgccacctactt | |
| | | TLPWTFGGGTKLEIRRTVAAPSV | | ctgccaacaaggccacactcttccttggacctttggtggaggcacaaagctggaaattcggcgaa | |
| | | FIFPPSDEQLKSGTASVVCLLNN | | ctgtagccgcaccaagcgtgttcatctttccgccatccgatgaacagctgaagtcaggcacagcg | |
| | | FYPREAKVQWKVDNALQSGNSQE | | tcagttgtctgtctcctcaacaacttctaccccagagaggccaaagtgcagtggaaagtggacaa | |
| | | SVTEQDSKDSTYSLSSTLTLSKA | | tgccctgcagtcaggcaattctcaggaatctgtgacagagcaggactccaaagacagtacctata | |
| | | DYEKHKVYACEVTHQGLSSPVTK | | gcctgtctagcacactgacgctctctaaggccgactatgagaagcacaaggtctatgcctgtgaa | |
| | | SFNRGEC | | gtgacacatcaagggctgagcagtccagtcactaagagcttcaatcgtggggaatgc | |
| chi- | Heavy | EVLLQQSGPELVKPGASVKITCK | 105 | gaggttctgcttcagcagagtggaccagaactggtgaaacctggagcctccgtgaagatcacgtg | 106 |
| meric | Chain | ASGYTFTDYNMDWVKQSHGKSLE | | caaagcctctggctataccttcaccgactacaacatggactgggtgaagcagagtcatgggaaaa | |
| HM647- | | WIGDIDPNNGGTVYNQKFKDKAS | | gcctggagtggataggcgacatcgatcccaataatggtggcactgtgtacaaccagaagttcaag | |
| IgG1- | | LTVDKSSSTGYMELRSLTSEDTA | | gataaggccagcttgacagtcgacaaatcctcctctacagggtatatggaactccgctctctgac | |
| K322A | | VYYCARWRSAMDYWGQGTSVTVS | | tagcgaggatacagccgtctactactgtgcaaggtggagatcagccatggactattggggtcaag | |
| | | SASTKGPSVFPLAPSSKSTSGGT | | gcacctcagtgaccgttagctccgcgtcgaccaagggcccctccgtgttccccctggccccctcc | |
| | | AALGCLVKDYFPEPVTVSWNSGA | | tccaagtccacctccggcggcaccgccgccctgggctgcctggtgaaggactacttccccgagcc | |
| | | LTSGVHTFPAVLQSSGLYSLSSV | | cgtgaccgtgtcctggaactccggcgccctgacctccggcgtgcacaccttccccgccgtgctcc | |
| | | VTVPSSSLGTQTYICNVNHKPSN | | agtcctccggcctgtactccctgtcctccgtggtgaccgtgccctcctcctccctgggcacccag | |
| | | TKVDKKVEPKSCDKTHTCPPCPA | | acctacatctgcaacgtgaaccacaagccctccaacaccaaggtggacaagaaggtcgagcccaa | |
| | | PELLGGPSVFLFPPKPKDTLMIS | | gtcctgcgacaagacccacacctgccccccctgccccgcccccgagctgctgggcggcccctccg | |
| | | RTPEVTCVVVDVSHEDPEVKFNW | | tgttcctgttcccccccaagcccaaggacaccctgatgatctccaggacccccgaggtgacctgc | |
| | | YVDGVEVHNAKTKPREEQYNSTY | | gtggtggtggacgtgtcccacgaggaccccgaggtgaagttcaactggtacgtggacggcgtgga | |
| | | RVVSVLTVLHQDWLNGKEYKCAV | | ggtgcacaacgccaagaccaagcccagggaggagcagtacaactccacctacagggtggtgtccg | |
| | | SNKALPAPIEKTISKAKGQPREP | | tgctgaccgtgctgcaccaggactggctgaacggcaaggagtacaagtgcgccgtgtccaacaag | |
| | | QVYTLPPSRDELTKNQVSLTCLV | | gccctgcccgcccccatcgagaagaccatctccaaggccaagggccagcccagggagccccaggt | |
| | | KGFYPSDIAVEWESNGQPENNYK | | gtacaccctgcccccctccagggacgagctgaccaagaaccaggtgtccctgacctgcctggtga | |
| | | TTPPVLDSDGSFFLYSKLTVDKS | | agggcttctacccctccgacatcgccgtggagtgggagtccaacggccagcccgagaacaactac | |
| | | RWQQGNVFSCSVMHEALHNHYTQ | | aagaccaccccccccgtgctggactccgacggctccttcttcctgtactccaagctgaccgtgga | |
| | | KSLSLSPGK | | caagtccaggtggcagcagggcaacgtgttctcctgctccgtgatgcacgaggccctgcacaacc | |
| | | | | actacacccagaagtccctgtccctgtcccccggcaag | |
| | Light | DIQMTQPTSSLSASLGDRVTISC | 107 | gacatccagatgacacaacccacgtctagcttgtctgccagcttgggagatagggtgaccattag | 108 |
| | Chain | RASQDISNYLNWYQQKPDGTVKL | | ctgcagagcctcacaggacatcagcaactacctgaactggtatcagcagaaacccgatgggacag | |
| | | LISYTSRLHSGVPSRFSGSGSGT | | tcaagctgctgatctcctataccagtcgacttcactccggtgttccatcacgcttttctgggtct | |
| | | DYSLTISNLEQVDIATYFCQQYS | | ggcagtggcactgactactcactgaccatttccaatctcgaacaagtggacatagccacctactt | |
| | | TLPWTFGGGSKLEIKRTVAAPSV | | ctgtcagcagtattccacccttccttggacatttggaggtggcagtaagctggagatcaaacgaa | |
| | | FIFPPSDEQLKSGTASVVCLLNN | | ctgtagccgcaccaagcgtgttcatctttccgccatccgatgaacagctgaagtcaggcacagcg | |
| | | FYPREAKVQWKVQNALQSGNSQE | | tcagttgtctgtctcctcaacaacttctaccccagagaggccaaagtgcagtggaaagtggacaa | |
| | | SVTEQDSKDSTYSLSSTLTLSKA | | tgccctgcagtcaggcaattctcaggaatctgtgacagagcaggactccaaagacagtacctata | |
| | | DYEKHKVYACEVTHQGLSSPVTK | | gcctgtctagcacactgacgctctctaaggccgactatgagaagcacaaggtctatgcctgtgaa | |
| | | SFNRGEC | | gtgacacatcaagggctgagcagtccagtcactaagagcttcaatcgtggggaatgc | |
| chi- | Heavy | EVLLQQSGPELVKPGASVKIPCK | 109 | gaagttctgcttcagcagtctggtcctgaactcgtgaagccaggagcatccgtcaagatcccctg | 110 |
| meric | Chain | ASGYTFTDYNMDWVKQSHGKSLE | | caaagcatctggctataccttcaccgactacaacatggattgggtgaagcagtcacacggcaaaa | |
| HM698- | | WIGDIDPNNGGTVYNQKFKGKAS | | gcctggagtggataggggacattgatcccaataatggcggaacagtgtacaaccagaagttcaag | |
| IgG1- | | LTVDKSSSTAYMELRSLTSEDTA | | ggcaaagcctctttgactgtggacaaaagctcctcaacggcctatatggagctgaggagtctgac | |
| K322A | | VYYCARWRSAMDYWGQGTSVTVS | | cagtgaggatactgccgtgtactactgtgcacgctggagaagtgccatggactattggggacaag | |
| | | SASTKGPSVFPLAPSSKSTSGGT | | ggacatccgtcaccgttagctccgcgtcgaccaagggcccctccgtgttccccctggccccctcc | |
| | | AALGCLVKDYFPEPVTVSWNSGA | | tccaagtccacctccggcggcaccgccgccctgggctgcctggtgaaggactacttccccgagcc | |
| | | LTSGVHTFPAVLQSSGLYSLSSV | | cgtgaccgtgtcctggaactccggcgccctgacctccggcgtgcacaccttccccgccgtgctcc | |
| | | VTVPSSSLGTQTYICNVNHKPSN | | agtcctccggcctgtactccctgtcctccgtggtgaccgtgccctcctcctccctgggcacccag | |
| | | TKVDKKVEPKSCDKTHTGPPCPA | | acctacatctgcaacgtgaaccacaagccctccaacaccaaggtggacaagaaggtcgagcccaa | |
| | | PELLGGPSVFLFPPKPKDTLMIS | | gtcctgcgacaagacccacacctgccccccctgccccgcccccgagctgctgggcggcccctccg | |
| | | RTPEVTCVVVDVSHEDPEVKFNW | | tgttcctgttcccccccaagcccaaggacaccctgatgatctccaggacccccgaggtgacctgc | |
| | | YVDGVEVHNAKTKPREEQYNSTY | | gtggtggtggacgtgtcccacgaggaccccgaggtgaagttcaactggtacgtggacggcgtgga | |
| | | RVVSVLTVLHQDWLNGKEYKCAV | | ggtgcacaacgccaagaccaagcccagggaggagcagtacaactccacctacagggtggtgtccg | |
| | | SNKALPAPIEKTISKAKGQPREP | | tgctgaccgtgctgcaccaggactggctgaacggcaaggagtacaagtgcgccgtgtccaacaag | |
| | | QVYTLPPSRDELTKNQVSLTCLV | | gccctgcccgcccccatcgagaagaccatctccaaggccaagggccagcccagggagccccaggt | |
| | | KGFYPSDIAVEWESNGGPENNYK | | gtacaccctgcccccctccagggacgagctgaccaagaaccaggtgtccctgacctgcctggtga | |
| | | TTPPVLDSDGSFFLYSKLTVDKS | | agggcttctacccctccgacatcgccgtggagtgggagtccaacggccagcccgagaacaactac | |
| | | RWQQGNVFSCSVMHEALHNHYTQ | | aagaccaccccccccgtgctggactccgacggctccttcttcctgtactccaagctgaccgtgga | |
| | | KSLSLSPGK | | caagtccaggtggcagcagggcaacgtgttctcctgctccgtgatgcacgaggccctgcacaacc | |
| | | | | actacacccagaagtccctgtccctgtcccccggcaag | |
| | Light | DIQMTQTTSSLSASLGDRVTISC | 111 | gacatacagatgacccaaacgactagttccctttctgcctcattgggcgatcgagtgaccatttc | 112 |
| | Chain | RASQDISNYLNWYQQKPDGTVKL | | ctgtagagccagtcaggacatcagcaattacctgaactggtatcagcagaaacccgatgggactg | |
| | | LIYYTSRLHSGVPSRFSGSGSGT | | tgaagctgctgatctactacacatcaaggctgcatagcggcgttccatctcggtttagcggaagt | |
| | | DYSLTISNLEQEDIATYFCQQYN | | ggctctggaaccgactattccctcactatctccaatctggaacaggaggatattgccacctattt | |
| | | TLPWTFGGGTKLEIKRTVAAPSV | | ctgccaacagtacascacactcccttggacctttggaggtgggacaaagttggagatcaaacgaa | |
| | | FIFPPSDEQLKSGTASVVCLLNN | | ctgtagccgcaccaagcgtgttcatctttccgccatccgatgaacagctgaagtcaggcacagcg | |
| | | FYPREAKVQWKVDNALQSGNSQE | | tcagttgtctgtctcctcaacaacttctaccccagagaggccaaagtgcagtggaaagtggacaa | |
| | | SVTEQDSKDSTYSLSSTLTLSKA | | tgccctgcagtcaggcaattctcaggaatctgtgacagagcaggactccaaagacagtacctata | |
| | | DYEKHKVYACEVTHQGLSSPVTK | | gcctgtctagcacactgacgctctctaaggccgactatgagaagcacaaggtctatgcctgtgaa | |
| | | SFNRGEC | | gtgacacatcaagggctgagcagtccagtcactaagagcttcaatcgtggggaatgc | |
| chi- | Heavy | QVQLQQSGPELVKPGASVKMSCK | 113 | caggtccagctgcagcaaagtggaccagaactggttaaacccggcgcaagtgtgaagatgagctg | 114 |
| meric | Chain | ASGYTFTSYYIQWVKQRPGQGLE | | taaggcttcagggtatacatttaccagctactacatccagtgggtaaagcagcgacctggtcaag | |
| HM266- | | WIGWIYPGDGSSKYNEKFKGKTT | | gcctggagtggatagggtggatttatccgggagatggatccagcaaatataacgagaagttcaag | |
| X2 | | LTADKSSSTAYMLLSSLTSEDSG | | ggcaagaccacactgacggccgacaaatctagctcaacggcctacatgctgctcagctccttgac | |
| | | IYFCASYYGSSFDYWGQGTTLTV | | ttccgaagattctgggatttacttctgcgcttcctactatggctctagcttcgactattggggcc | |
| | | SSASTKGPSVFPLAPSSKSTSGG | | aaggtaccacattgacagtcagctccgcgtcgaccaagggcccctccgtgttccccctggccccc | |
| | | TAALGQLVKDYFPEPVTVSWNSG | | tcctccaagtccacctccggcggcaccgccgccctgggctgcctggtgaaggactacttccccga | |
| | | ALTSGVHTFPAVLQSSGLYSLSS | | gcccgtgaccgtgtcctggaactccggcgccctgacctccggcgtgcacaccttccccgccgtgc | |
| | | VVTVPSSSLGTQTYICNYNHKPS | | tccagtcctccggcctgtactccctgtcctccgtggtgaccgtgccctcctcctccctgggcacc | |
| | | NTKVDKKVEPKSCDKTHTCPPCP | | cagacctacatctgcaacgtgaaccacaagccctccaacaccaaggtggacaagaaggtcgagcc | |
| | | APELLQGPSVFLFPPKPKDTLMI | | caagtcctgcgacaagacccacacctgccccccctgccccgcccccgagctgctggacggcccct | |
| | | SRTPEVTCVVVDVSDEDPEVKFN | | ccgtgttcctgttcccccccaagcccaaggacaccctgatgatctccaggacccccgaggtgacc | |
| | | WYVDGVEVHNAKTKPREEQYNST | | tgcgtggtggtggacgtgtccgacgaggaccccgaggtgaagttcaactggtacgtggacggcgt | |
| | | YRVVSVLTVLHQDWLNGKEYKCK | | ggaggtgcacaacgccaagaccaagcccagggaggagcagtacaactccacctacagggtggtgt | |
| | | VSNKALPAPIEKTISKAKGQPRE | | ccgtgctgaccgtgctgcaccaggactggctgaacggcaaggagtacaagtgcaaggtgtccaac | |
| | | PQVYTLPPSRDELTKNQVSLTCL | | aaggccctgcccgcccccatcgagaagaccatctccaaggccaagggccagcccagggagcccca | |
| | | VKGFYPSDIAVEWESNGQPENNY | | ggtgtacaccctgcccccctccagggacgagctgaccaagaaccaggtgtccctgacctgcctgg | |
| | | KTTPPVLDSDGSFFLYSKLTVDK | | tgaagggcttctacccctccgacatcgccgtggagtgggagtccaacggccagcccgagaacaac | |
| | | SRWQQGNVFSCSVMHEALHNHYT | | tacaagaccaccccccccgtgctggactccgacggctccttcttcctgtactccaagctgaccgt | |
| | | QKSLSLSPGK | | ggacaagtccaggtggcagcagggcaacgtgttctcctgctccgtgatgcacgaggccctgcaca | |
| | | | | accactacacccagaagtccctgtccctgtcccccggcaag | |
| | Light | DIQMTQTTSSLSASLGDRVTISC | 115 | gacattcagatgactcagaccacgtcctccttgtccgcctctttgggagatcgcgttaccatctc | 116 |
| | Chain | RASQDISNYLNWYQQKPDGTVKF | | ttgcagagcatctcaggatattagcaactacctgaactggtatcagcagaaacccgatgggacgg | |
| | | LIYYSSRLHSGVPSRFSGSGSGT | | tgaagttcctcatctactattcctccagacttcactctggggtaccatcacggtttagtggcagt | |
| | | DYSLTISNLEQEDIATYFCQQGS | | ggtagcggcaccgactactctctcaccatttccaaccttgaacaggaggacatagccacctactt | |
| | | TLPFTFGGGTKLEIKRTVAAPSV | | ttgccaacaagggagcactctgccctttacatttggcggaggtaccaaactggagatcaaacgaa | |
| | | FIFPPSDEQLKSGTASVVCLLNN | | ctgtagccgcaccaagcgtgttcatctttccgccatccgatgaacagctgaagtcaggcacagcg | |
| | | FYPREAKVQWKVDNALQSGNSQE | | tcagttgtctgtctcctcaacaacttctaccccagagaggccaaagtgcagtggaaagtggacaa | |
| | | SVTEQDSKDSTYSLSSTLTLSKA | | tgccctgcagtcaggcaattctcaggaatctgtgacagagcaggactccaaagacagtacctata | |
| | | DYEKHKVYACEVTHQGLSSPVTK | | gcctgtctagcacactgacgctctctaaggccgactatgagaagcacaaggtctatgcctgtgaa | |
| | | SFNRGEC | | gtgacacatcaagggctgagcagtccagtcactaagagcttcaatcgtggggaatgc | |
| chi- | Heavy | QVQLQQSGPELVKPGASVKMSCK | 117 | caggtccagctgcagcaaagtggaccagaactggttaaacccggcgcaagtgtgaagatgagctg | 118 |
| meric | Chain | ASGYTFTSYYIQWVKQRPGQGLE | | taaggcttcagggtatacatttaccagctactacatccagtgggtaaagcagcgacctggtcaag | |
| HM266- | | WIGWIYPGDGSSKYNEKFKGKTT | | gcctggagtggatagggtggatttatccgggagatggatccagcaaatataacgagaagttcaag | |
| X2-K | | LTADKSSSTAYMLLSSLTSEDSG | | ggcaagaccacactgacggccgacaaatctagctcaacggcctacatgctgctcagctccttgac | |
| | | IYFCASYYGSSFDYWGQGTTLTV | | ttccgaagattctgggatttacttctgcgcttcctactatggctctagcttcgactattggggcc | |
| | | SSASTKGPSVFPLAPSSKSTSGG | | aaggtaccacattgacagtcagatccgcctccaccaaaggcccctctgtgtttccactggcacca | |
| | | TAALGCLVKDYFPEPVTVSWNSG | | agctcaaagtcaaccagtggtggaaccgctgctctgggctgtctggttaaggactatttccccga | |
| | | ALTSGVHTFPAVLQSSGLYSLSS | | acctgtaaccgtaagctggaatagtggcgcactgacctccggggtccacacatttcccgccgtgc | |
| | | VVTVPSSSLGTQTYICNVNHKPS | | tgcagagttcaggcctctattccctcagctccgtcgtgactgtcccctcctcttcccttggtact | |
| | | NTKVDKKVEPKSCDKTHTCPPCP | | cagacttacatctgcaacgtgaaccacaagccctccaacaccaaggtggacaagaaggtcgagcc | |
| | | APELLDGPSVFLFPPKPKDTLMI | | caagtcctgcgacaagacccacacctgccccccctgccccgcccccgagctgctggacggcccct | |
| | | SRTPEVTCVVVDVSDEDPEVKFN | | ccgtgttcctgttcccccccaagcccaaggacaccctgatgatctccaggacccccgaggtgacc | |
| | | WYVDGVEVHNAKTKPREEQYNST | | tgcgtggtggtggacgtgtccgacgaggaccccgaggtgaagttcaactggtacgtggacggcgt | |
| | | YRVVSVLTVLHQDWLNGKEYKCA | | ggaggtgcacaacgccaagaccaagcccagggaggagcagtacaactccacctacagggtggtgt | |
| | | VSNKALPAPIEKTISKAKGQPRE | | ccgtgctgaccgtgctgcaccaggactggctgaacggcaaggagtacaagtgcgccgtgtccaac | |
| | | PQVYTLPPSRDELTKNQVSLTCL | | aaggccctgcccgcccccatcgagaagaccatctccaaggccaagggccagcccagggagcccca | |
| | | VKGFYPSDIAVEWESNGQPENNY | | ggtgtacaccctgcccccctccagggacgagctgaccaagaaccaggtgtccctgacctgcctgg | |
| | | KTTPPVLDSDGSFFLYSKLTVDK | | tgaagggcttctacccctccgacatcgccgtggagtgggagtccaacggccagcccgagaacaac | |
| | | SRWQQGNVFSCSVMHEALHNHYT | | tacaagaccaccccccccgtgctggactccgacggctccttcttcctgtactccaagctgaccgt | |
| | | QKSLSLSPGK | | ggacaagtccaggtggcagcagggcaacgtgttctcctgctccgtgatgcacgaggccctgcaca | |
| | | | | accactacacccagaagtccctgtccctgtcccccggcaag | |
| | Light | DIQMTQTTSSLSASLGDRVTISC | 119 | gacattcagatgactcagaccacgtcctccttgtccgcctctttgggagatcgcgttaccatctc | 120 |
| | Chain | RASQDISNYLNWYQQKPDGTVKF | | ttgcagagcatctcaggatattagcaactacctgaactggtatcagcagaaacccgatgggacgg | |
| | | LIYYSSRLHSGVPSRFSGSGSGT | | tgaagttcctcatctactattcctccagacttcactctggggtaccatcacggtttagtggcagt | |
| | | DYSLTISNLEQEDIATYFCQQGS | | ggtagcggcaccgactactctctcaccatttccaaccttgaacaggaggacatagccacctactt | |
| | | TLPFTFGGGTKLEIKRTVAAPSV | | ttgccaacaagggagcactctgccctttacatttggcggaggtaccaaactggagatcaaacgaa | |
| | | FIFPPSDEQLKSGTASVVCLLNN | | ctgtagccgcaccaagcgtgttcatctttccgccatccgatgaacagctgaagtcaggcacagcg | |
| | | FYPREAKVQWKVDNALQSGNSQE | | tcagttgtctgtctcctcaacaacttctaccccagagaggccaaagtgcagtggaaagtggacaa | |
| | | SVTEQDSKDSTYSLSSTLTLSKA | | tgccctgcagtcaggcaattctcaggaatctgtgacagagcaggactccaaagacagtacctata | |
| | | DYEKHKVYACEVTHQGLSSPVTK | | gcctgtctagcacactgacgctctctaaggccgactatgagaagcacaaggtctatgcctgtgaa | |
| | | SFNRGEC | | gtgacacatcaagggctgagcagtccagtcactaagagcttcaatcgtggggaatgc | |
| chi- | Heavy | QVQLQQSGPELVKPGASVKMSCK | 121 | caggtccagctgcagcasagtggaccagaactggttaaacccggcgcaagtgtgaagatgagctg | 122 |
| meric | Chain | ASGYTFTSYYIQWVKQRPGQGLE | | taaggcttcagggtatacatttaccagctactacatccagtgggtaaagcagcgacctggtcaag | |
| HM266- | | WIGWIYPGDGSSKYNEKFKGKTT | | gcctggagtggatagggtggatttatccgggagatggatccagcaaatataacgagaagttcaag | |
| X2-KE | | LTADKSSSTAYMLLSSLTSEDSG | | ggcaagaccacactgacggccgacaaatctagctcaacggcctacatgctgctcagctccttgac | |
| | | IYFCASYYGSSFDYWGQGTTLTV | | ttccgaagattctgggatttacttctgcgcttcctactatggctctagcttcgactattggggcc | |
| | | SSASTKGPSVFPLAPSSKSTSGG | | aaggtaccacattgacagtcagctccgcctccaccaaaggcccctctgtgtttccactggcacca | |
| | | TAALGCLVKDYFPEPVTVSWNSG | | agctcaaagtcaaccagtggtggaaccgctgctctgggctgtctggttaaggactatttccccga | |
| | | ALTSGVHTFPAVLQSSGLYSLSS | | acctgtaaccgtaagctggaatagtggcgcactgacctccggggtccacacatttcccgccgtgc | |
| | | VVTVPSSSLGTQTYICNVNHKPS | | tgcagagttcaggcctctattccctcagctccgtcgtgactgtcccctcctcttcccttggtact | |
| | | NTKVDKKVEPKSCDKTHTCPPCP | | cagacttacatctgcaacgtgaaccacaagccctccaacaccaaggtggacaagaaggtcgagcc | |
| | | APELLQGPSVFLFPPKPKQTLMI | | caagtcctgcgacaagacccacacctgccccccctgccccgcccccgagctgctggacggcccct | |
| | | SRTPEVTCVVVDVSDEDPEVKFN | | ccgtgttcctgttcccccccaagcccaaggacaccctgatgatctccaggacccccgaggtgacc | |
| | | WYVDGVEVHNAKTKPRAEQYNST | | tgcgtggtggtggacgtgtccgacgaggaccccgaggtgaagttcaactggtacgtggacggcgt | |
| | | YRVVSVLTVLHQDWLNGKEYKCA | | ggaggtgcacaacgccaagaccaagcccagggccgagcagtacaactccacctacagggtggtgt | |
| | | VSNKALPAPIEKTISKAKGQPRE | | ccgtgctgaccgtgctgcaccaggactggctgaacggcaaggagtacaagtgcgccgtgtccaac | |
| | | PQVYTLPPSRDELTKNQVSLTCL | | aaggccctgcccgcccccatcgagaagaccatctccaaggccaagggccagcccagggagcccca | |
| | | VKGFYPSDIAVEWESNGQPENNY | | ggtgtacaccctgcccccctccagggacgagctgaccaagaaccaggtgtccctgacctgcctgg | |
| | | KTTPPVLDSDGSFFLYSKLTVDK | | tgaagggcttctacccctccgacatcgccgtggagtgggagtccaacggccagcccgagaacaac | |
| | | SRWQQGNVFSCSVMHEALHNHYT | | tacaagaccaccccccccgtgctggactccgacggctccttcttcctgtactccaagctgaccgt | |
| | | QKSLSLSPGK | | ggacaagtccaggtggcagcagggcaacgtgttctcctgctccgtgatgcacgaggccctgcaca | |
| | | | | accactacacccagaagtccctgtccctgtcccccggcaag | |
| | Light | DIQMTQTTSSLSASLGDRVTISC | 123 | gacattcagatgactcagaccacgtcctccttgtccgcctctttgggagatcgcgttaccatctc | 124 |
| | Chain | RASQDISNYLNWYQQKPDGTVKF | | ttgcagagcatctcaggatattagcaactacctgaactggtatcagcagaaacccgatgggacgg | |
| | | LIYYSSRLHSGVPSRFSGSGSGT | | tgaagttcctcatctactattcctccagacttcactctggggtaccatcacggtttagtggcagt | |
| | | DYSLTISNLEQEDIATYFCQQGS | | ggtagcggcaccgactactctctcaccatttccaaccttgaacaggaggacatagccacctactt | |
| | | TLPFTFGGGTKLEIKRTVAAPSV | | ttgccaacaagggagcactctgccctttacatttggcggaggtaccaaactggagatcsaacgaa | |
| | | FIFPPSDEQLKSGTASVVCLLNN | | ctgtagccgcaccaagcgtgttcatctttccgccatccgatgaacagctgaagtcaggcacagcg | |
| | | FYPREAKVQWKVDNALQSGNSQE | | tcagttgtctgtctcctcaacaacttctaccccagagaggccaaagtgcagtggaaagtggacaa | |
| | | SVTEQDSKDSTYSLSSTLTLSKA | | tgccctgcagtcaggcaattctcaggaatctgtgacagagcaggactccaaagacagtacctata | |
| | | DYEKHKVYACEVTHQGLSSPVTK | | gcctgtctagcacactgacgctctctaaggccgactatgagaagcacaaggtctatgcctgtgaa | |
| | | SFNRGEC | | gtgacacatcaagggctgagcagtccagtcactaagagcttcaatcgtggggaatgc | |
| chi- | Heavy | QVQLQQSGPELVKPGASVKMSCK | 125 | caggtccagctgcagcaaagtggaccagaactggttaaacccggcgcaagtgtgaagatgagctg | 126 |
| meric | Chain | ASGYTFTSYYIQWVKQRPGQGLE | | taaggcttcagggtatacatttaccagctactacatccagtgggtaaagcagcgacctggtcaag | |
| HM266- | | WIGWIYPGDGSSKYNEKFKGKTT | | gcctggagtggatagggtggatttatccgggagatggatccagcaaatataacgagaagttcaag | |
| X2-KS | | LTADKSSSTAYMLLSSLTSEDSG | | ggcaagaccacactgacggccgacaaatctagctcaacggcctacatgctgctcagctccttgac | |
| | | IYFCASYYGSSFDYWGQGTTLTV | | ttccgaagattctgggatttacttctgcgcttcctactatggctctagcttcgactattggggcc | |
| | | SSASTKGPSVFPLAPSSKSTSGG | | aaggtaccacattgacagtcagctccgcctccaccaaaggcccctctgtgtttccactggcacca | |
| | | TAALGQLVKDYFPEPVTVSWNSG | | agctcaaagtcaaccagtggtggaaccgctgctctgggctgtctggttaaggactatttccccga | |
| | | ALTSGVHTFPAVLQSSGLYSLSS | | acctgtaaccgtaagctggaatagtggcgcactgacctccggggtccacacatttcccgccgtgc | |
| | | VVTVPSSSLGTQTYICNVNHKPS | | tgcagagttcaggcctctattccctcagctccgtcgtgactgtcccctcctcttcccttggtact | |
| | | NTKVDKKVEPKSCDKTHTCPPCP | | cagacttacatctgcaacgtgaaccacaagccctccaacaccaaggtggacaagaaggtcgagcc | |
| | | APELLDGPSVFLFPPKPKQTLMI | | caagtcctgcgacaagacccacacctgccccccctgccccgcccccgagctgctggacggcccct | |
| | | SRTPEVTCVVVDVGDEDPEVKFN | | ccgtgttcctgttcccccccaagcccaaggacaccctgatgatctccaggacccccgaggtgacc | |
| | | WYVDGVEVHNAKTKPREEQYNST | | tgcgtggtggtggacgtgggcgacgaggaccccgaggtgaagttcaactggtacgtggacggcgt | |
| | | YRVVSVLTVLHQDWLNGKEYKCA | | ggaggtgcacaacgccaagaccaagcccagggaggagcagtacaactccacctacagggtggtgt | |
| | | VSNKALPAPIEKTISKAKGQPRE | | ccgtgctgaccgtgctgcaccaggactggctgaacggcaaggagtacaagtgcgccgtgtccaac | |
| | | PQVYTLPPSRDELTKNQVSLTCL | | aaggccctgcccgcccccatcgagaagaccatctccaaggccaagggccagcccagggagcccca | |
| | | VKGFYPSDIAVEWESNGQPENNY | | ggtgtacaccctgcccccctccagggacgagctgaccaagaaccaggtgtccctgacctgcctgg | |
| | | KTTPPVLDSDGSFFLYSKLTVDK | | tgaagggcttctacccctccgacatcgccgtggagtgggagtccaacggccagcccgagaacaac | |
| | | SRWQQGNVFSCSVMHEALHNHYT | | tacaagaccaccccccccgtgctggactccgacggctccttcttcctgtactccaagctgaccgt | |
| | | QKSLSLSPGK | | ggacaagtccaggtggcagcagggcaacgtgttctcctgctccgtgatgcacgaggccctgcaca | |
| | | | | accactacacccagaagtccctgtccctgtcccccggcaag | |
| | Light | DIQMTQTTSSLSASLGDRVTISC | 127 | gacattcagatgactcagaccacgtcctccttgtccgcctctttgggagatcgcgttaccatctc | 128 |
| | Chain | RASQDISNYLNWYQQKPDGTVKF | | ttgcagagcatctcaggatattagcaactacctgaactggtatcagcagaaacccgatgggacgg | |
| | | LIYYSSRLHSGVPSRFSGSGSGT | | tgaagttcctcatctactattcctccagacttcactctggggtaccatcacggtttagtggcagt | |
| | | DYSLTISNLEQEDIATYFCQQGS | | ggtagcggcaccgactactctctcaccatttccaaccttgaacaggaggacatagccacctactt | |
| | | TLPFTFGGGTKLEIKRTVAAPSV | | ttgccaacaagggagcactctgccctttacatttggcggaggtaccaaactggagatcaaacgaa | |
| | | FIFPPSDEQLKSGTASVVCLLNN | | ctgtagccgcaccaagcgtgttcatctttccgccatccgatgaacagctgaagtcaggcacagcg | |
| | | FYPREAKVQWKVDNALQSGNSQE | | tcagttgtctgtctcctcaacaacttctaccccagagaggccaaagtgcagtggaaagtggacaa | |
| | | SVTEQDSKDSTYSLSSTLTLSKA | | tgccctgcagtcaggcaattctcaggaatctgtgacagagcaggactccaaagacagtacctata | |
| | | DYEKHKVYACEVTHQGLSSPVTK | | gcctgtctagcacactgacgctctctaaggccgactatgagaagcacaaggtctatgcctgtgaa | |
| | | SFNRGEC | | gtgacacatcaagggctgagcagtccagtcactaagagcttcaatcgtggggaatgc | |
| chi- | Heavy | QVQLQQSGPELVKPGASVKMSCK | 129 | caggtccagctgcagcaaagtggaccagaactggttaaacccggcgcaagtgtgaagatgagctg | 130 |
| meric | Chain | ASGYTFTSYYIQWVKQRPGQGLE | | taaggcttcagggtatacatttaccagctactacatccagtgggtaaagcagcgacctggtcaag | |
| HM266- | | WIGWIYPGDGSSKYNEKFKGKTT | | gcctggagtggatagggtggatttatccgggagatggatccagcaaatataacgagaagttcaag | |
| X3 | | LTADKSSSTAYMLLSSLTSEDSG | | ggcaagaccacactgacggccgacaaatctagctcaacggcctacatgctgctcagctccttgac | |
| | | IYFCASYYGSSFDYWGQGTTLTV | | ttccgaagattctgggatttacttctgcgcttcctactatggctctagcttcgactattggggcc | |
| | | SSASTKGPSVFPLAPSSKSTSGG | | aaggtaccacattgacagtcagctccgcgtcgaccaagggcccctccgtgttccccctggccccc | |
| | | TAALGQLVKDYFPEPVTVSWNSG | | tcctccaagtccacctccggcggcaccgccgccctgggctgcctggtgaaggactacttccccga | |
| | | ALTSGVHTFPAVLQSSGLYSLSS | | gcccgtgaccgtgtcctggaactccggcgccctgacctccggcgtgcacaccttccccgccgtgc | |
| | | VVTVPSSSLGTQTYICNVNHKPS | | tccagtcctccggcctgtactccctgtcctccgtggtgaccgtgccctcctcctccctgggcacc | |
| | | NTKVDKKVEPKSCDKTHTCPPCP | | cagacctacatctgcaacgtgaaccacaagccctccaacaccaaggtggacaagaaggtcgagcc | |
| | | APELLGGPDVFLFPPKPKDTLMI | | caagtcctgcgacaagacccacacctgccccccctgccccgcccccgagctgctgggcggccccg | |
| | | SRTPEVTCVVVDVSDEDPEVKFN | | acgtgttcctgttcccccccaagcccaaggacaccctgatgatctccaggacccccgaggtgacc | |
| | | WYVDGVEVHNAKTKPREEQYNST | | tgcgtggtggtggacgtgtccgacgaggaccccgaggtgaagttcaactggtacgtggacggcgt | |
| | | YRVVSVLTVLHQDWLNGKEYKCK | | ggaggtgcacaacgccaagaccaagcccagggaggagcagtacaactccacctacagggtggtgt | |
| | | VSNKALPAPIEKTISKAKGQPRE | | ccgtgctgaccgtgctgcaccaggactggctgaacggcaaggagtacaagtgcaaggtgtccaac | |
| | | PQVYTLPPSRDELTKNQVSLTCL | | aaggccctgcccgcccccatcgagaagaccatctccaaggccaagggccagcccagggagcccca | |
| | | VKGFYPSDIAVEWESNGQPENNY | | ggtgtacaccctgcccccctccagggacgagctgaccaagaaccaggtgtccctgacctgcctgg | |
| | | KTTPPVLDSDGSFFLYSKLTVDK | | tgaagggcttctacccctccgacatcgccgtggagtgggagtccaacggccagcccgagaacaac | |
| | | SRWQQGNVFSCSVMHEALHNHYT | | tacaagaccaccccccccgtgctggactccgacggctccttcttcctgtactccaagctgaccgt | |
| | | QKSLSLSPGK | | ggacaagtccaggtggcagcagggcaacgtgttctcctgctccgtgatgcacgaggccctgcaca | |
| | | | | accactacacccagaagtccctgtccctgtcccccggcaag | |
| | Light | DIQMTQTTSSLSASLGDRVTISC | 131 | gacattcagatgactcagaccacgtcctccttgtccgcctctttgggagatcgcgttaccatctc | 132 |
| | Chain | RASQDISNYLNWYQQKPDGTVKF | | ttgcagagcatctcaggatattagcaactacctgaactggtatcagcagaaacccgatgggacgg | |
| | | LIYYSSRLHSGVPSRFSGSGSGT | | tgaagttcctcatctactattcctccagacttcactctggggtaccatcacggtttagtggcagt | |
| | | DYSLTISNLEQEDIATYFCQQGS | | ggtagcggcaccgactactctctcaccatttccaaccttgaacaggaggacatagccacctactt | |
| | | TLPFTFGGGTKLEIKRTVAAPSV | | ttgccaacaagggagcactctgccctttacatttggcggaggtaccaaactggagatcaaacgaa | |
| | | FIFPPSDEQLKSGTASVVCLLNN | | ctgtagccgcaccaagcgtgttcatctttccgccatccgatgaacagctgaagtcaggcacagcg | |
| | | FYPREAKVQWKVDNALQSGNSQE | | tcagttgtctgtctcctcaacaacttctaccccagagaggccaaagtgcagtggaaagtggacaa | |
| | | SVTEQDSKDSTYSLSSTLTLSKA | | tgccctgcagtcaggcaattctcaggaatctgtgacagagcaggactccaaagacagtacctata | |
| | | DYEKHKVYACEVTHQGLSSPVTK | | gcctgtctagcacactgacgctctctaaggccgactatgagaagcacaaggtctatgcctgtgaa | |
| | | SFNRGEC | | gtgacacatcaagggctgagcagtccagtcactaagagcttcaatcgtggggaatgc | |
| chi- | Heavy | QVQLQQSGPELVKPGASVKMSCK | 133 | caggtccagctgcagcaaagtggaccagaactggttaaacccggcgcaagtgtgaagatgagctg | 134 |
| meric | Chain | ASGYTFTSYYIQWVKQRPGQGLE | | taaggcttcagggtatacatttaccagctactacatccagtgggtaaagcagcgacctggtcaag | |
| HM266- | | WIGWIYPGDGSSKYNEKFKGKTT | | gcctggagtggatagggtggatttatccgggagatggatccagcaaatataacgagaagttcaag | |
| X3-K | | LTADKSSSTAYMLLSSLTSEDSG | | ggcaagaccacactgacggccgacaaatctagctcaacggcctacatgctgctcagctccttgac | |
| | | IYFCASYYGSSFDYWGQGTTLTV | | ttccgaagattctgggatttacttctgcgcttcctactatggctctagcttcgactattggggcc | |
| | | SSASTKGPSVFPLAPSSKSTSGG | | aaggtaccacattgacagtcagctccgcctccaccaaaggcccctctgtgtttccactggcacca | |
| | | TAALGCLVKDYFPEPVTVSWNSG | | agctcaaagtcaaccagtggtggaaccgctgctctgggctgtctggttaaggactatttccccga | |
| | | ALTSGVHTFPAVLQSSGLYSLSS | | acctgtaaccgtaagctggaatagtggcgcactgacctccggggtccacacatttcccgccgtgc | |
| | | VVTVPSSSLGTQTYICNVNHKPS | | tgcagagttcaggcctctattccctcagctccgtcgtgactgtcccctcctcttcccttggtact | |
| | | NTKVDKKVEPKSCDKTHTCPPCP | | cagacttacatctgcaacgtgaaccacaagccctccaacaccaaggtggacaagaaggtcgagcc | |
| | | APELLGGPDVFLFPPKPKDTLMI | | caagtcctgcgacaagacccacacctgccccccctgccccgcccccgagctgctgggcggccccg | |
| | | SRTPEVTCVVVDVSDEDPEVKFN | | acgtgttcctgttcccccccaagcccaaggacaccctgatgatctccaggacccccgaggtgacc | |
| | | WYVDGVEVHNAKTKPREEQYNST | | tgcgtggtggtggacgtgagtgacgaggaccccgaggtgaagttcaactggtacgtggacggcgt | |
| | | YRVVSVLTVLHQDWLNGKEYKCA | | ggaggtgcacaacgccaagaccaagcccagggaggagcagtacaactccacctacagggtggtgt | |
| | | VSNKALPAPIEKTISKAKGQPRE | | ccgtgctgaccgtgctgcaccaggactggctgaacggcaaggagtacaagtgcgccgtgtccaac | |
| | | PQVYTLPPSRDELTKNQVSLTCL | | aaggccctgcccgcccccatcgagaagaccatctccaaggccaagggccagcccagggagcccca | |
| | | VKGFYPSDIAVEWESNGQPENNY | | ggtgtacaccctgcccccctccagggacgagctgaccaagaaccaggtgtccctgacctgcctgg | |
| | | KTTPPVLDSDGSFFLYSKLTVDK | | tgaagggcttctacccctccgacatcgccgtggagtgggagtccaacggccagcccgagaacaac | |
| | | SRWQQGNVFSCSVMHEALHNHYT | | tacaagaccaccccccccgtgctggactccgacggctccttcttcctgtactccaagctgaccgt | |
| | | QKSLSLSPGK | | ggacaagtccaggtggcagcagggcaacgtgttctcctgctccgtgatgcacgaggccctgcaca | |
| | | | | accactacacccagaagtccctgtccctgtcccccggcaag | |
| | Light | DIQMTQTTSSLSASLGDRVTISC | 135 | gacattcagatgactcagaccacgtcctccttgtccgcctctttgggagatcgcgttaccatctc | 136 |
| | Chain | RASQDISNYLNWYQQKPDGTVKF | | ttgcagagcatctcaggatattagcaactacctgaactggtatcagcagaaacccgatgggacgg | |
| | | LIYYSSRLHSGVPSRFSGSGSGT | | tgaagttcctcatctactattcctccagacttcactctggggtaccatcacggtttagtggcagt | |
| | | DYSLTISNLEQEDIATYFCQQGS | | ggtagcggcaccgactactctctcaccatttccaaccttgaacaggaggacatagccacctactt | |
| | | TLPFTFGGGTKLEIKRTVAAPSV | | ttgccaacaagggagcactctgccctttacatttggcggaggtaccaaactggagatcaaacgaa | |
| | | FIFPPSDEQLKSGTASVVGLLNN | | ctgtagccgcaccaagcgtgttcatctttccgccatccgatgaacagctgaagtcaggcacagcg | |
| | | FYPREAKVQWKVDNALQSGNSQE | | tcagttgtctgtctcctcaacaacttctaccccagagaggccaaagtgcagtggaaagtggacaa | |
| | | SVTEQDSKDSTYSLSSTLTLSKA | | tgccctgcagtcaggcaattctcaggaatctgtgacagagcaggactccaaagacagtacctata | |
| | | DYEKHKVYACEVTHQGLSSPVTK | | gcctgtctagcacactgacgctctctaaggccgactatgagaagcacaaggtctatgcctgtgaa | |
| | | SFNRGEC | | gtgacacatcaagggctgagcagtccagtcactaagagcttcaatcgtggggaatgc | |
| chi- | Heavy | QVQLQQSGPELVKPGASVKMSCK | 137 | caggtccagctgcagcaaagtggaccagaactggttaaacccggcgcaagtgtgaagatgagctg | 138 |
| meric | Chain | ASGYTFTSYYIQWVKQRPGQGLE | | taaggcttcagggtatacatttaccagctactacatccagtgggtaaagcagcgacctggtcaag | |
| HM266- | | WIGWIYPGDGSSKYNEKFKGKTT | | gcctggagtggatagggtggatttatccgggagatggatccagcaaatataacgagaagttcaag | |
| X3-KE | | LTADKSSSTAYMLLSSLTSEDSG | | ggcaagaccacactgacggccgacaaatctagctcaacggcctacatgctgctcagctccttgac | |
| | | IYFCASYYGSSFDYWGQGTTLTV | | ttccgaagattctgggatttacttctgcgcttcctactatggctctagcttcgactattggggcc | |
| | | SSASTKGPSVFPLAPSSKSTSGG | | aaggtaccacattgacagtcagctccgcctccaccaaaggcccctctgtgtttccactggcacca | |
| | | TAALGCLVKDYFPEPVTVSWNSG | | agctcaaagtcaaccagtggtggaaccgctgctctgggctgtctggttaaggactatttccccga | |
| | | ALTSGVHTFPAVLQSSGLYSLSS | | acctgtaaccgtaagctggaatagtggcgcactgacctccggggtccacacatttcccgccgtgc | |
| | | VVTVPSSSLGTQTYICNVNHKPS | | tgcagagttcaggcctctattccctcagctccgtcgtgactgtcccctcctcttcccttggtact | |
| | | NTKVDKKVEPKSCDKTHTCPPCP | | cagacttacatctgcaacgtgaaccacaagccctccaacaccaaggtggacaagaaggtcgagcc | |
| | | APELLGGPDVFLFPPKPKDTLMI | | caagtcatgcgacaagacccacacctgccccccctgccccgcccccgagctgctgggcggccccg | |
| | | SRTPEVTCVVVDVSDEDPEVKFN | | acgtgttcctgttcccccccaagcccaaggacaccctgatgatctccaggacccccgaggtgacc | |
| | | WYVDGVEVHNAKTKPRAEQYNST | | tgcgtggtggtggacgtgagtgacgaggaccccgaggtgaagttcaactggtacgtggacggcgt | |
| | | YRVVSVLTVLHQDWLNGKEYKCA | | ggaggtgcacaacgccaagaccaagcccagggccgagcagtacaactccacctacagggtggtgt | |
| | | VSNKALPAPIEKTISKAKGQPRE | | ccgtgctgaccgtgctgcaccaggactggctgaacggcaaggagtacaagtgcgccgtgtccaac | |
| | | PQVYTLPPSRDELTKNQVSLTCL | | aaggccctgcccgcccccatcgagaagaccatctccaaggccaagggccagcccagggagcccca | |
| | | VKGFYPSDIAVEWESNGQPENNY | | ggtgtacaccctgcccccctccagggacgagctgaccaagaaccaggtgtccctgacctgcctgg | |
| | | KTTPPVLDSDGSFFLYSKLTVDK | | tgaagggcttctacccctccgacatcgccgtggagtgggagtccaacggccagcccgagaacaac | |
| | | SRWQQGNVFSCSVMHEALHNHYT | | tacaagaccaccccccccgtgctggactccgacggctccttcttcctgtactccaagctgaccgt | |
| | | QKSLSLSPGK | | ggacaagtccaggtggcagcagggcaacgtgttctcctgctccgtgatgcacgaggccctgcaca | |
| | | | | accactacacccagaagtccctgtccctgtcccccggcaag | |
| | Light | DIQMTQTTSSLSASLGDRVTISC | 139 | gacattcagatgactcagaccacgtcctccttgtccgcctctttgggagatcgcgttaccatctc | 140 |
| | Chain | RASQDISNYLNWYQQKPDGTVKF | | ttgcagagcatctcaggatattagcaactacctgaactggtatcagcagaaacccgatgggacgg | |
| | | LIYYSSRLHSGVPSRFSGSGSGT | | tgaagttcctcatctactattcctccagacttcactctggggtaccatcacggtttagtggcagt | |
| | | DYSLTISNLEQEDIATYFCQQGS | | ggtagcggcaccgactactctctcaccatttccaaccttgaacaggaggacatagccacctactt | |
| | | TLPFTFGGGTKLEIKRTVAAPSV | | ttgccaacaagggagcactctgccctttacatttggcggaggtaccaaactggagatcaaacgaa | |
| | | FIFPPSDEQLKSGTASVVCLLNN | | ctgtagccgcaccaagcgtgttcatctttccgccatccgatgaacagctgaagtcaggcacagcg | |
| | | FYPREAKVQWKVDNALQSGNSQE | | tcagttgtctgtctcctcaacaacttctaccccagagaggccaaagtgcagtggaaagtggacaa | |
| | | SVTEQDSKDSTYSLSSTLTLSKA | | tgccctgcagtcaggcaattctcaggaatctgtgacagagcaggactccaaagacagtacctata | |
| | | DYEKHKVYACEVTHQGLSSPVTK | | gcctgtctagcacactgacgctctctaaggccgactatgagaagcacaaggtctatgcctgtgaa | |
| | | SFNRGEC | | gtgacacatcaagggctgagcagtccagtcactaagagcttcaatcgtggggaatgc | |
| chi- | Heavy | QVQLQQSGPELVKPGASVKMSCK | 141 | caggtccagctgcagcaaagtggaccagaactggttaaacccggcgcaagtgtgaagatgagctg | 142 |
| meric | Chain | ASGYTFTSYYIQWVKQRPGQGLE | | taaggcttcagggtatacatttaccagctactacatccagtgggtaaagcagcgacctggtcaag | |
| HM266- | | WIGWIYPGDGSSKYNEKFKGKTT | | gcctggagtggatagggtggatttatccgggagatggatccagcaaatataacgagaagttcaag | |
| X3-KS | | LTADKSSSTAYMLLSSLTSEDSG | | ggcaagaccacactgacggccgacaaatctagctcaacggcctacatgctgctcagctccttgac | |
| | | IYFCASYYGSSFDYWGQGTTLTV | | ttccgaagattctgggatttacttctgcgcttcctactatggctctagcttcgactattggggcc | |
| | | SSASTKGPSVFPLAPSSKSTSGG | | aaggtaccacattgacagtcagctccgcctccaccaaaggcccctctgtgtttccactggcacca | |
| | | TAALGCLVKDYFPEPVTVSWNSG | | agctcaaagtcaaccagtggtggaaccgctgctctgggctgtctggttaaggactatttccccga | |
| | | ALTSGVHTFPAVLQSSGLYSLSS | | acctgtaaccgtaagctggaatagtggcgcactgacctccggggtccacacatttcccgccgtgc | |
| | | VVTVPSSSLGTQTYICNVNHKPS | | tgcagagttcaggcctctattccctcagctccgtcgtgactgtcccctcctcttcccttggtact | |
| | | NTKVDKKVEPKSCDKTHTCPPCP | | cagacttacatctgcaacgtgaaccacaagccctccaacaccaaggtggacaagaaggtcgagcc | |
| | | APELLGGPDVFLFPPKPKDTLMI | | caagtcctgcgacaagacccacacctgccccccctgccccgcccccgagctgctgggcggccccg | |
| | | SRTPEVTCVVVDVGDEDPEVKFN | | acgtgttcctgttcccccccaagcccaaggacaccctgatgatctccaggacccccgaggtgacc | |
| | | WYVDGVEVHNAKTKPREEQYNST | | tgcgtggtggtggacgtgggcgacgaggaccccgaggtgaagttcaactggtacgtggacggcgt | |
| | | YRVVSVLTVLHQDWLNGKEYKCA | | ggaggtgcacaacgccaagaccaagcccagggaggagcagtacaactccacctacagggtggtgt | |
| | | VSNKALPAPIEKTISKAKGQPRE | | ccgtgctgaccgtgctgcaccaggactggctgaacggcaaggagtacaagtgcgccgtgtccaac | |
| | | PQVYTLPPSRDELTKNQVSLTCL | | aaggccctgcccgcccccatcgagaagaccatctccaaggccaagggccagcccagggagcccca | |
| | | VKGFYPSDIAVEWESNGQPENNY | | ggtgtacaccctgcccccctccagggacgagctgaccaagaaccaggtgtccctgacctgcctgg | |
| | | KTTPPVLDSDGSFFLYSKLTVDK | | tgaagggcttctacccctccgacatcgccgtggagtgggagtccaacggccagcccgagaacaac | |
| | | SRWQQGNVFSCSVMHEALHNHYT | | tacaagaccaccccccccgtgctggactccgacggctccttcttcctgtactccaagctgaccgt | |
| | | QKSLSLSPGK | | ggacaagtccaggtggcagcagggcaacgtgttctcctgctccgtgatgcacgaggccctgcaca | |
| | | | | accactacacccagaagtccctgtccctgtcccccggcaag | |
| | Light | DIQMTQTTSSLSASLGDRVTISC | 143 | gacattcagatgactcagaccacgtcctccttgtccgcctctttgggagatcgcgttaccatctc | 144 |
| | Chain | RASQDISNYLNWYQQKPDGTVKF | | ttgcagagcatctcaggatattagcaactacctgaactggtatcagcagaaacccgatgggacgg | |
| | | LIYYSSRLHSGVPSRFSGSGSGT | | tgaagttcctcatctactattcctccagacttcactctggggtaccatcacggtttagtggcagt | |
| | | DYSLTISNLEQEDIATYFCQQGS | | ggtagcggcaccgactactctctcaccatttccaaccttgaacaggaggacatagccacctactt | |
| | | TLPFTFGGGTKLEIKRTVAAPSV | | ttgccaacaagggagcactctgccctttacatttggcggaggtaccaaactggagatcaaacgaa | |
| | | FIFPPSDEQLKSGTASVVCLLNN | | ctgtagccgcaccaagcgtgttcatctttccgccatccgatgaacagctgaagtcaggcacagcg | |
| | | FYPREAKVQWKVDNALQSGNSQE | | tcagttgtctgtctcctcaacaacttctaccccagagaggccaaagtgcagtggaaagtggacaa | |
| | | SVTEQDSKDSTYSLSSTLTLSKA | | tgccctgcagtcaggcaattctcaggaatctgtgacagagcaggactccaaagacagtacctata | |
| | | DYEKHKVYACEVTHQGLSSPVTK | | gcctgtctagcacactgacgctctctaaggccgactatgagaagcacaaggtctatgcctgtgaa | |
| | | SFNRGEG | | gtgacacatcaagggctgagcagtccagtcactaagagcttcaatcgtggggaatgc | |
| chi- | Heavy | QVQLQQSGPELVKPGASVKMSCK | 145 | caggtccagctgcagcaaagtggaccagaactggttaaacccggcgcaagtgtgaagatgagctg | 146 |
| meric | Chain | ASGYTFTSYYIQWVKQRPGQGLE | | taaggcttcagggtatacatttaccagctactacatccagtgggtaaagcagcgacctggtcaag | |
| HM266- | | WIGWIYPGDGSSKYNEKFKGKTT | | gcctggagtggatagggtggatttatccgggagatggatccagcaaatataacgagaagttcaag | |
| X4 | | LTADKSSSTAYMLLSSLTSEDSG | | ggcaagaccacactgacggccgacaaatctagctcaacggcctacatgctgctcagctccttgac | |
| | | IYFCASYYGSSFDYWGQGTTLTV | | ttccgaagattctgggatttacttctgcgcttcctactatggctctagcttcgactattggggcc | |
| | | SSASTKGPSVFPLAPSSKSTSGG | | aaggtaccacattgacagtcagctccgcgtcgaccaagggcccctccgtgttccccctggccccc | |
| | | TAALGCLVKDYFPEPVTVSWNSG | | tcctccaagtccacctccggcggcaccgccgccctgggctgcctggtgaaggactacttccccga | |
| | | ALTSGVHTFPAVLQSSGLYSLSS | | gcccgtgaccgtgtcctggaactccggcgccctgacctccggcgtgcacaccttccccgccgtgc | |
| | | VVTVPSSSLGTQTYICNVNHKPS | | tccagtcctccggcctgtactccctgtcctccgtggtgaccgtgccctcctcctccctgggcacc | |
| | | NTKVDKKVEPKSCDKTHTCPPCP | | cagacctacatctgcaacgtgaaccacaagccctccaacaccaaggtggacaagaaggtcgagcc | |
| | | APELLGGPDVFLFPPKPKDTLMI | | caagtcctgcgacaagacccacacctgccccccctgccccgcccccgagctgctgggcggccccg | |
| | | SRTPEVTCVVVDVSDEDPEVKFN | | acgtgttcctgttcccccccaagcccaaggacaccctgatgatctccaggacccccgaggtgacc | |
| | | WYVDGVEVHNAKTKPREEQYNST | | tgcgtggtggtggacgtgtccgacgaggaccccgaggtgaagttcaactggtacgtggacggcgt | |
| | | YRVVSVLTVLHQDWLNGKEYKCK | | ggaggtgcacaacgccaagaccaagcccagggaggagcagtacaactccacctacagggtggtgt | |
| | | VSNKAYPAPEEKTISKAKGQPRE | | ccgtgctgaccgtgctgcaccaggactggctgaacggcaaggagtacaagtgcaaggtgtccaac | |
| | | PQVYTLPPSRDELTKNQVSLICL | | aaggcctaccccgcccccgaggagaagaccatctccaaggccaagggccagcccagggagcccca | |
| | | VKGFYPSDIAVEWESNGQPENNY | | ggtgtacaccctgcccccctccagggacgagctgaccaagaaccaggtgtccctgacctgcctgg | |
| | | KTTPPVLDSDGSFFLYSKLTVDK | | tgaagggcttctacccctccgacatcgccgtggagtgggagtccaacggccagcccgagaacaac | |
| | | SRWQQGNVFSCSVMHEALHNHYT | | tacaagaccaccccccccgtgctggactccgacggctccttcttcctgtactccaagctgaccgt | |
| | | QKSLSLSPGK | | ggacaagtccaggtggcagcagggcaacgtgttctcctgctccgtgatgcacgaggccctgcaca | |
| | | | | accactacacccagaagtccctgtccctgtcccccggcaag | |
| | Light | DIQMTQTTSSLSASLGDRVTISC | 147 | gacattcagatgactcagaccacgtcctccttgtccgcctctttgggagatcgcgttaccatctc | 148 |
| | Chain | RASQDISNYLNWYQQKPDGTVKF | | ttgcagagcatctcaggatattagcaactacctgaactggtatcagcagaaacccgatgggacgg | |
| | | LIYYSSRLHSGVPSRFSGSGSGT | | tgaagttcctcatctactattcctccagacttcactctggggtaccatcacggtttagtggcagt | |
| | | DYSLTISNLEQEDIATYFCQQGS | | ggtagcggcaccgactactctctcaccatttccaaccttgaacaggaggacatagccacctactt | |
| | | TLPFTFGGGTKLEIKRTVAAPSV | | ttgccaacaagggagcactctgccctttacatttggcggaggtaccaaactggagatcaaacgaa | |
| | | FIFPPSDEQLKSGTASVVCLLNN | | ctgtagccgcaccaagcgtgttcatctttccgccatccgatgaacagctgaagtcaggcacagcg | |
| | | FYPREAKVQWKVDNALQSGNSQE | | tcagttgtctgtctcctcaacaacttctaccccagagaggccaaagtgcagtggaaagtggacaa | |
| | | SVTEQDSKDSTYSLSSTLTLSKA | | tgccctgcagtcaggcaattctcaggaatctgtgacagagcaggactccaaagacagtacctata | |
| | | DYEKHKVYACEVTHQGLSSPVTK | | gcctgtctagcacactgacgctctctaaggccgactatgagaagcacaaggtctatgcctgtgaa | |
| | | SFNRGEC | | gtgacacatcaagggctgagcagtccagtcactaagagcttcaatcgtggggaatgc | |
| chi- | Heavy | QVQLQQSGPELVKPGASVKMSCK | 149 | caggtccagctgcagcaaagtggaccagaactggttaaacccggcgcaagtgtgaagatgagctg | 150 |
| meric | Chain | ASGYTFTSYYIQWVKQRPGQGLE | | taaggcttcagggtatacatttaccagctactacatccagtgggtaaagcagcgacctggtcaag | |
| HM266- | | WIGWIYPGDGSSKYNEKFKGKTT | | gcctggagtggatagggtggatttatccgggagatggatccagcaaatataacgagaagttcaag | |
| X4-K | | LTADKSSSTAYMLLSSLTSEDSG | | ggcaagaccacactgacggccgacaaatctagctcaacggcctacatgctgctcagctccttgac | |
| | | IYFCASYYGSSFDYWGQGTTLTV | | ttccgaagattctgggatttacttctgcgcttcctactatggctctagcttcgactattggggcc | |
| | | SSASTKGPSVFPLAPSSKSTSGG | | aaggtaccacattgacagtcagctccgcctccaccaaaggcccctctgtgtttccactggcacca | |
| | | TAALGCLVKDYFPEPVTVSWNSG | | agctcaaagtcaaccagtggtggaaccgctgctctgggctgtctggttaaggactatttccccga | |
| | | ALTSGVHTFPAVLQSSGLYSLSS | | acctgtaaccgtaagctggaatagtggcgcactgacctccggggtccacacatttcccgccgtgc | |
| | | VVTVPSSSLGTQTYICNVNHKPS | | tgcagagttcaggcctctattccctcagctccgtcgtgactgtcccctcctcttcccttggtact | |
| | | NTKVDKKVEPKSCDKTHTCPPCP | | cagacttacatctgcaacgtgaaccacaagccctccaacaccaaggtggacaagaaggtcgagcc | |
| | | APELLGGPDVFLFPPKPKDTLMI | | caagtcctgcgacaagacccacacctgccccccctgccccgcccccgagctgctgggcggccccg | |
| | | SRTPEVTCVVVDVSDEDPEVKFN | | acgtgttcctgttcccccccaagcccaaggacaccctgatgatctccaggacccccgaggtgacc | |
| | | WYVDGVEVHNAKTKPREEQYNST | | tgcgtggtggtggacgtgtccgacgaggaccccgaggtgaagttcaactggtacgtggacggcgt | |
| | | YRVVSVLTVLHQDWLNGKEYKCA | | ggaggtgcacaacgccaagaccaagcccagggaggagcagtacaactccacctacagggtggtgt | |
| | | VSNKAYPAPEEKTISKAKGQPRE | | ccgtgctgaccgtgctgcaccaggactggctgaacggcaaggagtacaagtgcgccgtgtccaac | |
| | | PQVYTLPPSRDELTKNQVSLTCL | | aaggcctaccccgcccccgaggagaagaccatctccaaggccaagggccagcccagggagcccca | |
| | | VKGFYPSDIAVEWESNGQPENNY | | ggtgtacaccctgcccccctccagggacgagctgaccaagaaccaggtgtccctgacctgcctgg | |
| | | KTTPPVLDSDGSFFLYSKLTVDK | | tgaagggcttctacccctccgacatcgccgtggagtgggagtccaacggccagcccgagaacaac | |
| | | SRWQQGNVFSCSVMHEALHNHYT | | tacaagaccaccccccccgtgctggactccgacggctccttcttcctgtactccaagctgaccgt | |
| | | QKSLSLSPGK | | ggacaagtccaggtggcagcagggcaacgtgttctcctgctccgtgatgcacgaggccctgcaca | |
| | | | | accactacacccagaagtccctgtccctgtcccccggcaag | |
| | Light | DIQMTQTTSSLSASLGDRVTISC | 151 | gacattcagatgactcagaccacgtcctccttgtccgcctctttgggagatcgcgttaccatctc | 152 |
| | Chain | RASQDISNYLNWYQQKPDGTVKF | | ttgcagagcatctcaggatattagcaactacctgaactggtatcagcagaaacccgatgggacgg | |
| | | LIYYSSRLHSGVPSRFSGSGSGT | | tgaagttcctcatctactattcctccagacttcactctggggtaccatcacggtttagtggcagt | |
| | | DYSLTISNLEQEDIATYFCQQGS | | ggtagcggcaccgactactctctcaccatttccaaccttgaacaggaggacatagccacctactt | |
| | | TLPFTFGGGTKLEIKRTVAAPSV | | ttgccaacaagggagcactctgccctttacatttggcggaggtaccaaactggagatcaaacgaa | |
| | | FIFPPSDEQLKSGTASVVCLLNN | | ctgtagccgcaccaagcgtgttcatctttccgccatccgatgaacagctgaagtcaggcacagcg | |
| | | FYPREAKVQWKVDNALQSGNSQE | | tcagttgtctgtctcctcaacaacttctaccccagagaggccaaagtgcagtggaaagtggacaa | |
| | | SVTEQDSKDSTYSLSSTLTLSKA | | tgccctgcagtcaggcaattctcaggaatctgtgacagagcaggactccaaagacagtacctata | |
| | | DYEKHKVYACEVTHQGLSSPVTK | | gcctgtctagcacactgacgctctctaaggccgactatgagaagcacaaggtctatgcctgtgaa | |
| | | SFNRGEC | | gtgacacatcaagggctgagcagtccagtcactaagagcttcaatcgtggggaatgc | |
| chi- | Heavy | QVQLQQSGPELVKPGASVKMSCK | 153 | caggtccagctgcagcaaagtggaccagaactggttaaacccggcgcaagtgtgaagatgagctg | 154 |
| meric | Chain | ASGYTFTSYYIQWVKQRPGQGLE | | taaggcttcagggtatacatttaccagctactacatccagtgggtaaagcagcgacctggtcaag | |
| HM266- | | WIGWIYPGDGSSKYNEKFKGKTT | | gcctggagtggatagggtggatttatccgggagatggatccagcaaatataacgagaagttcaag | |
| IgG4- | | LTADKSSSTAYMLLSSLTSEDSG | | ggcaagaccacactgacggccgacaaatctagctcaacggcctacatgctgctcagctccttgac | |
| S228P | | IYFCASYYGSSFDYWGQGTTLTV | | ttccgaagattctgggatttacttctgcgcttcctactatggctctagcttcgactattggggcc | |
| | | SSASTKGPSVFPLAPCSRSTSES | | aaggtaccacattgacagtcagctccgcctcaacgaagggtccttctgtctttcccttggcacct | |
| | | TAALGCLVKDYFPEPVTVSWNSG | | tgttctcggtccacaagcgagagcaccgcggctctgggctgcttggtgaaagactacttccccga | |
| | | ALTSGVHTFPAVLQSSGLYSLSS | | gcccgttacagtgtcctggaacagtggagctttgacttctggggtgcatactttcccagctgtgc | |
| | | VVTVPSSSLGTKTYTCNVDHKPS | | tgcagtctagcggactctatagccttagctcagtggtaactgtaccttcttcctcactcgggacc | |
| | | NTKVDKRVESKYGPPCPPCPAPE | | aaaacctacacatgcaatgtggaccacaaacccagtaataccaaagtggacaaacgtgtcgagtc | |
| | | FLGGPSVFLFPPKPKDTLMISRT | | caaatatggcccgccctgtccaccttgtccagctccagaatttctgggaggacctagcgtattcc | |
| | | PEVTCVVVDVSQEDPEVQFNWYV | | tgtttcctccgaaacctaaggatacgctcatgatttctcgcactcccgaagtgacatgtgttgtg | |
| | | DGVEVHNAKTKPREEQFNSTYRV | | gtcgacgtgagtcaagaagatccagaggttcagttcaactggtatgtcgatggggttgaggtcca | |
| | | VSVLTVLHQDWLNGKEYKCKVSN | | caatgccaagactaagcctagagaggagcagtttaactccacataccgagtcgtgtcagtgctga | |
| | | KGLPSSIEKTISKAKGQPREPQV | | ccgtcctgcatcaggactggctcaatgggaaggagtacaaatgcaaagtctccaataagggcctg | |
| | | YTLPPSQEEMTKNQVSLTCLVKG | | ccaagtagcatagasaagaccatttcaaaagcgaaaggccaaccccgggaaccccaggtgtatac | |
| | | FYPSDIAVEWESNGQPENNYKTT | | cctgccaccaagccaagaggagatgaccaagaatcaggttagtctcacttgcctggtcaaaggat | |
| | | PPVLDSDGSFFLYSRLTVDKSRW | | tctatccctctgacatcgccgtcgaatgggagtccaatggccagcccgaaaacaactacaagacc | |
| | | QEGNVFSCSVMHEALHNHYTQKS | | acacctccagttctggacagcgacggtagtttcttcctgtactcacgcctgacagtggacaagag | |
| | | LSLSPGR | | cagatggcaggaaggcaacgtattcagctgctccgtgatgcacgaagccctgcacaatcactaca | |
| | | | | cacagaagagtttgagcctttcccctggtaga | |
| | Light | DIQMTQTTSSLSASLGDRVTISC | 155 | gacattcagatgactcagaccacgtcctccttgtccgcctctttgggagatcgcgttaccatctc | 156 |
| | Chain | RASQDISNYLNWYQQKPDGTVKF | | ttgcagagcatctcaggatattagcaactacctgaactggtatcagcagaaacccgatgggacgg | |
| | | LIYYSSRLHSGVPSRFSGSGSGT | | tgaagttcctcatctactattcctccagacttcactctggggtaccatcacggtttagtggcagt | |
| | | DYSLTISNLEQEDIATYFCQQGS | | ggtagcggcaccgactactctctcaccatttccaaccttgaacaggaggacatagccacctactt | |
| | | TLPFTFGGGTKLEIKRTVAAPSV | | ttgccaacaagggagcactctgccctttacatttggcggaggtaccaaactggagatcaaacgaa | |
| | | FIFPPSDEQLKSGTASVVCLLNN | | ctgtagccgcaccaagcgtgttcatctttccgccatccgatgaacagctgaagtcaggcacagcg | |
| | | FYPREAKVQWKVDNALQSGNSQE | | tcagttgtctgtctcctcaacaacttctaccccagagaggccaaagtgcagtggaaagtggacaa | |
| | | SVTEQDSKDSTYSLSSTLTLSKA | | tgccctgcagtcaggcaattctcaggaatctgtgacagagcaggactccaaagacagtacctata | |
| | | DYEKHKVYACEVTHQGLSSPVTK | | gcctgtctagcacactgacgctctctaaggccgactatgagaagcacaaggtctatgcctgtgaa | |
| | | SFNRGEC | | gtgacacatcaagggctgagcagtccagtcactaagagcttcaatcgtggggaatgc | |
| chi- | Heavy | QVQLQQSGPELVKPGASVKMSCK | 157 | caggtccagctgcagcaaagtggaccagaactggttaaacccggcgcaagtgtgaagatgagctg | 158 |
| meric | Chain | ASGYTFTSYYIQWVKQRPGQGLE | | taaggcttcagggtatacatttaccagctactacatccagtgggtaaagcagcgacctggtcaag | |
| HM266- | | WIGWIYPGDGSSKYNEKFKGKTT | | gcctggagtggatagggtggatttatccgggagatggatccagcaaatataacgagaagttcaag | |
| X2-P | | LTADKSSSTAYMLLSSLTSEDSG | | ggcaagaccacactgacggccgacaaatctagctcaacggcctacatgctgctcagctccttgac | |
| | | IYFCASYYGSSFDYWGQGTTLTV | | ttccgaagattctgggatttacttctgcgcttcctactatggctctagcttcgactattggggcc | |
| | | SSASTKGPSVFPLAPCSRSTSES | | aaggtaccacattgacagtcagctccgcctcaacgaagggtccttctgtctttcccttggcacct | |
| | | TAALGCLVKDYFPEPVTVSWNSG | | tgttctcggtccacaagcgagagcaccgcggctctgggctgcttggtgaaagactacttccccga | |
| | | ALTSGVHTFPAVLQSSGLYSLSS | | gcccgttacagtgtcctggaacagtggagctttgacttctggggtgcatactttcccagctgtgc | |
| | | VVTVPSSSLGTKTYTCNVDHKPS | | tgcagtctagcggactctatagccttagctcagtggtaactgtaccttcttcctcactcgggacc | |
| | | NTKVDKRVESKYGPPCPPCPAPE | | aaaacctacacatgcaatgtggaccacaaacccagtaataccaaagtggacaaacgtgtcgagtc | |
| | | FLDGPSVFLFPPKPKDILMISRT | | caaatatggcccgccctgtccaccttgtccagctccagaatttctggacggacctagcgtattcc | |
| | | PEVTCVVVDVSDEDPEVQFNWYV | | tgtttcctccgaaacctaaggatacgctcatgatttctcgcactcccgaagtgacatgtgttgtg | |
| | | DGVEVHNAKTKPREEQFNSTYRV | | gtcgacgtgagtgacgaagatccagaggttcagttcaactggtatgtcgatggggttgaggtcca | |
| | | VSVLTVLHQDWLNGKEYKCKVSN | | caatgccaagactaagcctagagaggagcagtttaactccacataccgagtcgtgtcagtgctga | |
| | | KGLPSSIEKTISKAKGQPREPQV | | ccgtcctgcatcaggactggctcaatgggaaggagtacaaatgcaaagtctccaataagggcctg | |
| | | YTLPPSQEEMTKNQVSLTCLVKG | | ccaagtagcatagaaaagaccatttcaaaagcgaaaggccaaccccgggaaccccaggtgtatac | |
| | | FYPSDIAVEWESNGQPENNYKTT | | cctgccaccaagccaagaggagatgaccaagaatcaggttagtctcacttgcctggtcaaaggat | |
| | | PPVLDSDGSFFLYSRLTVDKSRW | | tctatccctctgacatcgccgtcgaatgggagtccaatggccagcccgaaaacaactacaagacc | |
| | | QEGNVFSCSVMHEALHNHYTQKS | | acacctccagttctggacagcgacggtagtttcttcctgtactcacgcctgacagtggacaagag | |
| | | LSLSPGR | | cagatggcaggaaggcaacgtattcagctgctccgtgatgcacgaagccctgcacaatcactaca | |
| | | | | cacagaagagtttgagcctttcccctggtaga | |
| | Light | DIQMTQTTSSLSASLGDRVTISC | 159 | gacattcagatgactcagaccacgtcctccttgtccgcctctttgggagatcgcgttaccatctc | 160 |
| | Chain | RASQDISNYLNWYQQKPDGTVKF | | ttgcagagcatctcaggatattagcaactacctgaactggtatcagcagaaacccgatgggacgg | |
| | | LIYYSSRLHSGVPSRFSGSGSGT | | tgaagttcctcatctactattcctccagacttcactctggggtaccatcacggtttagtggcagt | |
| | | DYSLTISNLEQEDIATYFCQQGS | | ggtagcggcaccgactactctctcaccatttccaaccttgaacaggaggacatagccacctactt | |
| | | TLPFTFGGGTKLEIKRTVAAPSV | | ttgccaacaagggagcactctgccctttacatttggcggaggtaccaaactggagatcaaacgaa | |
| | | FIFPPSDEQLKSGTASVVCLLNN | | ctgtagccgcaccaagcgtgttcatctttccgccatccgatgaacagctgaagtcaggcacagcg | |
| | | FYPREAKVQWKVDNALQSGNSQE | | tcagttgtctgtctcctcaacaacttctaccccagagaggccaaagtgcagtggaaagtggacaa | |
| | | SVTEQDSKDSTYSLSSTLTLSKA | | tgccctgcagtcaggcaattctcaggaatctgtgacagagcaggactccaaagacagtacctata | |
| | | DYEKHKVYACEVTHQGLSSPVTK | | gcctgtctagcacactgacgctctctaaggccgactatgagaagcacaaggtctatgcctgtgaa | |
| | | SFNRGEC | | gtgacacatcaagggctgagcagtccagtcactaagagcttcaatcgtggggaatgc | |
| chi- | Heavy | QVQLQQSGPELVKPGASVKMSCK | 161 | caggtccagctgcagcaaagtggaccagaactggttaaacccggcgcaagtgtgaagatgagctg | 162 |
| meric | Chain | ASGYTFTSYYIQWVKQRPGQGLE | | taaggcttcagggtatacatttaccagctactacatccagtgggtaaagcagcgacctggtcaag | |
| HM266- | | WIGWIYPGDGSSKYNEKFKGKTT | | gcctggagtggatagggtggatttatccgggagatggatccagcaaatataacgagaagttcaag | |
| X3-P | | LTADKSSSTAYMLLSSLTSEDSG | | ggcaagaccacactgacggccgacaaatctagctcaacggcctacatgctgctcagctccttgac | |
| | | IYFCASYYGSSFDYWGQGTTLTV | | ttccgaagattctgggatttacttctgcgcttcctactatggctctagcttcgactattggggcc | |
| | | SSASTKGPSVFPLAPCSRSTSES | | aaggtaccacattgacagtcagctccgcctcaacgaagggtccttctgtctttcccttggcacct | |
| | | TAALGCLVKDYFPEPVTVSWNSG | | tgttctcggtccacaagcgagagcaccgcggctctgggctgcttggtgaaagactacttccccga | |
| | | ALTSGVHTFPAVLQSSGLYSLSS | | gcccgttacagtgtcctggaacagtggagctttgacttctggggtgcatactttcccagctgtgc | |
| | | VVTVPSSSLGTKTYTCNVDHKPS | | tgcagtctagcggactctatagccttagctcagtggtaactgtaccttcttcctcactcgggacc | |
| | | NTKVDKRVESKYGPPCPPCPAPE | | aaaacctacacatgcaatgtggaccacaaacccagtaataccaaagtggacaaacgtgtcgagtc | |
| | | FLGGPDVFLFPPKPKDTLMISRT | | caaatatggcccgccctgtccaccttgtccagctccagaatttctgggaggacctgacgtattcc | |
| | | PEVTCVVVDVSDEDPEVQFNWYV | | tgtttcctccgaaacctaaggatacgctcatgatttctcgcactcccgaagtgacatgtgttgtg | |
| | | DGVEVHNAKTKPREEQFNSTYRV | | gtcgacgtgagtgacgaagatccagaggttcagttcaactggtatgtcgatggggttgaggtcca | |
| | | VSVLTVLHQDWLNGKEYKCKVSN | | caatgccaagactaagcctagagaggagcagtttaactccacataccgagtcgtgtcagtgctga | |
| | | KGLPSSIEKTISKAKGQPREPQV | | ccgtcctgcatcaggactggctcaatgggaaggagtacaaatgcaaagtctccaataagggcctg | |
| | | YTLPPSQEEMTKNQVSLTCLVKG | | ccaagtagcatagaaaagaccatttcaaaagcgaaaggccaaccccgggaaccccaggtgtatac | |
| | | FYPSDIAVEWESNGQPENNYKTT | | cctgccaccaagccaagaggagatgaccaagaatcaggttagtctcacttgcctggtcaaaggat | |
| | | PPVLDSDGSFFLYSRLTVDKSRW | | tctatccctctgacatcgccgtcgaatgggagtccaatggccagcccgaaaacaactacaagacc | |
| | | QEGNVFSCSVMHEALHNHYTQKS | | acacctccagttctggacagcgacggtagtttcttcctgtactcacgcctgacagtggacaagag | |
| | | LSLSPGR | | cagatggcaggaaggcaacgtattcagctgctccgtgatgcacgaagccctgcacaatcactaca | |
| | | | | cacagaagagtttgagcctttcccctggtaga | |
| | Light | DIQMTQTTSSLSASLGDRVTISC | 163 | gacattcagatgactcagaccacgtcctccttgtccgcctctttgggagatcgcgttaccatctc | 164 |
| | Chain | RASQDISNYLNWYQQKPDGTVKF | | ttgcagagcatctcaggatattagcaactacctgaactggtatcagcagaaacccgatgggacgg | |
| | | LIYYSSRLHSGVPSRFSGSGSGT | | tgaagttcctcatctactattcctccagacttcactctggggtaccatcacggtttagtggcagt | |
| | | DYSLTISNLEQEDIATYFCQQGS | | ggtagcggcaccgactactctctcaccatttccaaccttgaacaggaggacatagccacctactt | |
| | | TLPFTFGGGTKLEIKRTVAAPSV | | ttgccaacaagggagcactctgccctttacatttggcggaggtaccaaactggagatcaaacgaa | |
| | | FIFPPSDEQLKSGTASVVGLLNN | | ctgtagccgcaccaagcgtgttcatctttccgccatccgatgaacagctgaagtcaggcacagcg | |
| | | FYPREAKVQWKVDNALQSGNSQE | | tcagttgtctgtctcctcaacaacttctaccccagagaggccaaagtgcagtggaaagtggacaa | |
| | | SVTEQDSKDSTYSLSSTLTLSKA | | tgccctgcagtcaggcaattctcaggaatctgtgacagagcaggactccaaagacagtacctata | |
| | | DYEKHKVYACEVTHQGLSSPVTK | | gcctgtctagcacactgacgctctctaaggccgactatgagaagcacaaggtctatgcctgtgaa | |
| | | SFNRGEC | | gtgacacatcaagggctgagcagtccagtcactaagagcttcaatcgtggggaatgc | |
| chi- | Heavy | QVQLQQSGPELVKPGASVKMSCK | 165 | caggtccagctgcagcaaagtggaccagaactggttaaacccggcgcaagtgtgaagatgagctg | 166 |
| meric | Chain | ASGYTFTSYYIQWVKQRPGQGLE | | taaggcttcagggtatacatttaccagctactacatccagtgggtaaagcagcgacctggtcaag | |
| HM266- | | WIGWIYPGDGSSKYNEKFKGKTT | | gcctggagtggatagggtggatttatccgggagatggatccagcaaatataacgagaagttcaag | |
| X4-P | | LTADKSSSTAYMLLSSLTSEDSG | | ggcaagaccacactgacggccgacaaatctagctcaacggcctacatgctgctcagctccttgac | |
| | | IYFCASYYGSSFDYWGQGTTLTV | | ttccgaagattctgggatttacttctgcgcttcctactatggctctagcttcgactattggggcc | |
| | | SSASTKGPSVFPLAPCSRSTSES | | aaggtaccacattgacagtcagctccgcctcaacgaagggtccttctgtctttcccttggcacct | |
| | | TAALGQLVKDYFPEPVTVSWNSG | | tgttctcggtccacaagcgagagcaccgcggctctgggctgcttggtgaaagactacttccccga | |
| | | ALTSGVHTFPAVLQSSGLYSLSS | | gcccgttacagtgtcctggaacagtggagctttgacttctggggtgcatactttcccagctgtgc | |
| | | VVTVPSSSLGTKTYTCNVDHKPS | | tgcagtctagcggactctatagccttagctcagtggtaactgtaccttcttcctcactcgggacc | |
| | | NTKVDKRVESKYGPPCPPCPAPE | | aaaacctacacatgcaatgtggaccacaaacccagtaataccaaagtggacaaacgtgtcgagtc | |
| | | FLGGPDVFLFPPKPKDTLMISRT | | caaatatggcccgccctgtccaccttgtccagctccagaatttctgggaggacctgacgtattcc | |
| | | PEVTCVVVDVSDEDPEVQFNWYV | | tgtttcctccgaaacctaaggatacgctcatgatttctcgcactcccgaagtgacatgtgttgtg | |
| | | DGVEVHNAKTKPREEQFNSTYRV | | gtcgacgtgagtgacgaagatccagaggttcagttcaactggtatgtcgatggggttgaggtcca | |
| | | VSVLTVLHQDWLNGKEYKCKVSN | | caatgccaagactaagcctagagaggagcagtttaactccacataccgagtcgtgtcagtgctga | |
| | | KGYPSSEEKTISKAKGQPREPQV | | ccgtcctgcatcaggactggctcaatgggaaggagtacaaatgcaaagtctccaataagggctac | |
| | | YTLPPSQEEMTKNQVSLTCLVKG | | ccaagtagcgaggasaagaccatttcaaaagcgaaaggccaaccccgggaaccccaggtgtatac | |
| | | FYPSDIAVEWESNGQPENNYKTT | | cctgccaccaagccaagaggagatgaccaagaatcaggttagtctcacttgcctggtcaaaggat | |
| | | PPVLDSDGSFFLYSRLTVDKSRW | | tctatccctctgacatcgccgtcgaatgggagtccaatggccagcccgaaaacaactacaagacc | |
| | | QEGNVFSCSVMHEALHNHYTQKS | | acacctccagttctggacagcgacggtagtttcttcctgtactcacgcctgacagtggacaagag | |
| | | LSLSPGR | | cagatggcaggaaggcaacgtattcagctgctccgtgatgcacgaagccctgcacaatcactaca | |
| | | | | cacagaagagtttgagcctttcccctggtaga | |
| | Light | DIQMTQTTSSLSASLGDRVTISC | 167 | gacattcagatgactcagaccacgtcctccttgtccgcctctttgggagatcgcgttaccatctc | 168 |
| | Chain | RASQDISNYLNWYQQKPDGTVKF | | ttgcagagcatctcaggatattagcaactacctgaactggtatcagcagaaacccgatgggacgg | |
| | | LIYYSSRLHSGVPSRFSGSGSGT | | tgaagttcctcatctactattcctccagacttcactctggggtaccatcacggtttagtggcagt | |
| | | DYSLTISNLEQEDIATYFCQQGS | | ggtagcggcaccgactactctctcaccatttccaaccttgaacaggaggacatagccacctactt | |
| | | TLPFTFGGGTKLEIKRTVAAPSV | | ttgccaacaagggagcactctgccctttacatttggcggaggtaccaaactggagatcaaacgaa | |
| | | FIFPPSDEQLKSGTASVVCLLNN | | ctgtagccgcaccaagcgtgttcatctttccgccatccgatgaacagctgaagtcaggcacagcg | |
| | | FYPREAKVQWKVDNALQSGNSQE | | tcagttgtctgtctcctcaacaacttctaccccagagaggccaaagtgcagtggaaagtggacaa | |
| | | SVTEQDSKDSTYSLSSTLTLSKA | | tgccctgcagtcaggcaattctcaggaatctgtgacagagcaggactccaaagacagtacctata | |
| | | DYEKHKVYACEVTHQGLSSPVTK | | gcctgtctagcacactgacgctctctaaggccgactatgagaagcacaaggtctatgcctgtgaa | |
| | | SFNRGEC | | gtgacacatcaagggctgagcagtccagtcactaagagcttcaatcgtggggaatgc | |
| human- | Heavy | QVQLVQSGPEVKKPGASVKVVCK | 169 | caggtgcagttggtccagagtggaccagaggtgaagaagcctggggccagtgtgaaggtggtctg | 170 |
| ized | Chain | ASGYTFTSYYIQWVKQRPGQGLE | | caaggcatcaggatacacgtttaccagctattacatccagtgggtgaagcaacgtcctggtcagg | |
| HM242- | | WIGWIYPGDGTTKYNEKFKGRVT | | gacttgaatggattggctggatttaccccggtgatggcactactaagtacaatgagaagttcaaa | |
| C3- | | MTIDKSTRTAYMELRSLRSDDTA | | ggacgagtcaccatgaccatcgataagtcaactcgcacagcctatatggagctgagaagtctgcg | |
| IgG1- | | VYYCASYYGSYFDYWGQGTLVTV | | ctctgacgatacagctgtgtattactgcgcctcctactatgggtcctacttcgactattggggcc | |
| K322A | | SSASTKGPSVFPLAPSSKSTSGG | | agggcactctggtcaccgtgtctagtgcctccaccaaaggcccctctgtgtttccactggcacca | |
| | | TAALGCLVKDYFPEPVTVSWNSG | | agctcaaagtcaaccagtggtggaaccgctgctctgggctgtctggttaaggactatttccccga | |
| | | ALTSGVHTFPAVLQSSGLYSLSS | | acctgtaaccgtaagctggaatagtggcgcactgacctccggggtccacacatttcccgccgtgc | |
| | | VVTVPSSSLGTQTYICNVNHKPS | | tgcagagttcaggcctctattccctcagctccgtcgtgactgtcccctcctcttcccttggtact | |
| | | NTKVDKKVEPKSCDKTHTCPPCP | | cagacttacatctgcaatgtgaaccataagccctccaacaccaaggtggacaagaaagtagagcc | |
| | | APELLGGPSVFLFPPKPKDTLMI | | taagagttgtgacaaaacacacacctgtccaccatgtccagcacccgaattgctgggtggtccat | |
| | | SRTPEVTCVVVDVSHEDPEVKFN | | ccgtgtttctgttccctcctaagcccaaagatacactgatgatttctcggactccagaggttacg | |
| | | WYVDGVEVHNAKTKPREEQYNST | | tgcgtggttgtggatgtcagccatgaagatcctgaggtcaaatttaactggtatgtggacggagt | |
| | | YRVVSVLTVLHQDWLNGKEYKCA | | ggaggtccacaatgccaaaacaaaacccagggaagagcagtacaactctacttatcgagttgtat | |
| | | VSNKALPAPIEKTISKAKGQPRE | | ccgtgctcacagtgctgcatcaggactggttgaatgggaaagagtacaagtgcgccgtatctaac | |
| | | PQVYTLPPSRDELTKNQVSLTCL | | aaagccttgcctgctcctatcgagaaaacaatcagcaaagccaagggacaacccagagaacccca | |
| | | VKGFYPSDIAVEWESNGQPENNY | | ggtttacacccttccaccttccagggacgaactgaccaagaatcaggtgtctttgacatgcctgg | |
| | | KTTPPVLDSDGSFFLYSKLTVDK | | ttaaaggcttctatccctctgacatagctgtagaatgggagagcaatggacagccagagaacaac | |
| | | SRWQQGNVFSCSVMHEALHNHYT | | tacaagacgacacctcccgttctggatagcgatgggtcattctttctgtatagcaaactcaccgt | |
| | | QKSLSLSPGK | | ggacaagtcacggtggcaacaaggcaacgtgttctcctgtagcgttatgcacgaagctcttcaca | |
| | | | | accactacacccagaagtctctgagcctctctcccggcaag | |
| | Light | DIQMTQSPSSLSASVGDRVTITC | 171 | gacattcagatgacccaaagccctagtagcctttccgcttcagttggcgatagggtcaccattac | 172 |
| | Chain | RASQDISNYLNWYQQKPGKAPKL | | gtgtcgagctagccaggatatctcaaactacctgaattggtatcagcagaaacctggcaaagccc | |
| | | LIYYTSKLHSGVPSRFSGSGSGT | | ctaagctgctgatctactacactagtaagctgcatagcggagttccctctaggttctccggaagc | |
| | | DYTLTISSLQPEDFATYYCQQSS | | ggttcagggacagactataccctgaccattagctccttgcaaccagaggactttgctacctacta | |
| | | TLPFTFGQGTKLEIKRTVAAPSV | | ttgccagcagtctagtactcttccctttacctttggccagggtactaagctggagatcaaacgga | |
| | | FIFPPSDEQLKSGTASVVCLLNN | | cggttgcagcaccatccgtctttatcttcccaccttctgacgagcagctcaagtccggtactgcc | |
| | | FYPREAKVQWKVDNALQSGNSQE | | tccgtagtgtgtctcctgaacaacttctatcccagagaagccaaggtgcagtggaaagtggacaa | |
| | | SVTEQDSKDSTYSLSSTLTLSKA | | tgctctgcagtctgggaacagtcaagagtctgtgactgaacaggattccaaggatagcacctact | |
| | | DYEKHKVYACEVTHQGLSSPVTK | | ccttgagttctacccttacactgtcaaaagccgactacgagaagcacaaggtgtatgcctgcgaa | |
| | | SFNRGEC | | gtcacacaccaagggttgtcatctcccgtgacaaagtccttcaatcgtggcgaatgc | |
| human- | Heavy | QVQLVQSGPEVKKPGASVKVVCK | 173 | caggtgcagctggttcagagcggtcccgaggtgaagaaaccaggtgcttccgtgaaggtagtttg | 174 |
| ized | Chain | ASGYTFTSYYIQWVRQVPGQGLE | | caaagccagtggctatactttcacctcctattacatccaatgggtgagacaggtgcctggccaag | |
| HM242- | | WMGWIYPGDGTTKYNEKFKGRVT | | gtcttgagtggatggggtggatctatcccggcgatggtaccactaagtacaacgagaagttcaaa | |
| D3- | | MTIDTSTSTAYMELRSLRSDDTA | | gggagggttacgatgaccattgacacctcaactagcactgcttatatggaactgagatctctgcg | |
| IgG1- | | VYYCASYYGSYFDYWGQGTLVTV | | atccgatgacacagcagtgtactactgcgcaagctactacggatcttactttgactattggggac | |
| K322A | | SSASTKGPSVFPLAPSSKSTSGG | | aaggaactctggtcacagtgtctagtgcctcaaccaagggaccatccgtgttcccattggctccc | |
| | | TAALGCLVKDYFPEPVTVSWNSG | | agttccaaaagcaccagtggtggcaccgctgcccttggatgcctcgtaaaggactactttcctga | |
| | | ALTSGVHTFPAVLQSSGLYSLSS | | gcccgtgacggtatcctggaactccggagcacttacatctggggtgcacacctttcctgccgtcc | |
| | | VVTVPSSSLGTQTYICNVNHKPS | | tgcagtcatctggcctgtattctctgtcctctgtggtgacagtgcctagcagttctttgggaact | |
| | | NTKVDKKVEPKSCDKTHTCPPCP | | cagacctacatctgcaatgtcaaccacaagccctctaatacgaaggtcgataagaaggtggaacc | |
| | | APELLGGPSVFLFPPKPKDTLMI | | caaaagctgtgacaaaacccacacctgtcctccatgtcccgctcctgaactgctgggtggaccct | |
| | | SRTPEVTCVVVDVSHEDPEVKFN | | ctgtgtttctgttcccacccaaacctaaagataccctgatgattagtaggacaccagaggtgaca | |
| | | WYVDGVEVHNAKTKPREEQYNST | | tgtgtcgtagtcgatgtgtcccatgaggaccctgaagtcaagttcaattggtacgttgatggcgt | |
| | | YRVVSVLTVLHQDWLNGKEYKCA | | tgaggttcacaatgccaagaccaagccccgggaagagcagtataactcaacctatcgggtcgtca | |
| | | VSNKALPAPIEKTISKAKGQPRE | | gcgtgctcactgtgctgcatcaggactggttgaacgggaaggagtataagtgtgcagtcagtaac | |
| | | PQVYTLPPSRDELTKNQVSLTCL | | aaagccctgcctgctcccatcgaaaagactatcagcaaggccaaggggcagccccgagaacctca | |
| | | VKGFYPSDIAVEWESNGQPENNY | | ggtgtatactctcccaccttctcgtgatgaactgaccaagaatcaggtatcactgacatgccttg | |
| | | KTTPPVLDSDGSFFLYSKLTVDK | | tgaaaggcttttatccctccgacatagctgtcgagtgggagagcaatgggcagccagagaataac | |
| | | SRWQQGNVFSCSVMHEALHNHYT | | tacaagacaacaccacccgtcctcgatagcgacggctccttctttctgtactccaagctcacagt | |
| | | QKSLSLSPGK | | tgacaaaagccgctggcaacagggcaacgtgtttagctgcagtgtaatgcatgaagccctgcaca | |
| | | | | accactacacacagaaatccctctccttgtcaccaggcaaa | |
| | Light | DIQMTQSPSSLSASVGDRVTITC | 175 | gacattcagatgacccaaagccctagtagcctttccgcttcagttggcgatagggtcaccattac | 176 |
| | Chain | RASQDISNYLNWYQQKPGKAPKL | | gtgtcgagctagccaggatatctcaaactacctgaattggtatcagcagaaacctggcaaagccc | |
| | | LIYYTSKLHSGVPSRFSGSGSGT | | ctaagctgctgatctactacactagtaagctgcatagcggagttccctctaggttctccggaagc | |
| | | DYTLTISSLQPEDFATYYCQQSS | | ggttcagggacagactataccctgaccattagctccttgcaaccagaggactttgctacctacta | |
| | | TLPFTFGQGTKLEIKRTVAAPSV | | ttgccagcagtctagtactcttccctttacctttggccagggtactaagctggagatcaaacgga | |
| | | FIFPPSDEQLKSGTASVVCLLNN | | cggttgcagcaccatccgtctttatcttcccaccttctgacgagcagctcaagtccggtactgcc | |
| | | FYPREAKVQWKVDNALQSGNSQE | | tccgtagtgtgtctcctgaacaacttctatcccagagaagccaaggtgcagtggaaagtggacaa | |
| | | SVTEQDSKDSTYSLSSTLTLSKA | | tgctctgcagtctgggaacagtcaagagtctgtgactgaacaggattccaaggatagcacctact | |
| | | DYEKHKVYACEVTHQGLSSPVTK | | ccttgagttctacccttacactgtcaaaagccgactacgagaagcacaaggtgtatgcctgcgaa | |
| | | SFNRGEC | | gtcacacaccaagggttgtcatctcccgtgacaaagtccttcaatcgtggcgaatgc | |
| human- | Heavy | QVQLVQSGPEVKKPGASVKVVCK | 177 | caggtgcagctggttcagtccgggcctgaggtgaagaagcccggcgctagtgtgaaggtcgtctg | 178 |
| ized | Chain | TSGYTFTSYYIQWLKQRPGQGLE | | caaaacttcaggctataccttcacatcctattacatccagtggctgaagcaacgccctggacaag | |
| HM268- | | WIGWIYFGDASTKYNEKFKGRVT | | ggctcgaatggatcgggtggatctactttggggacgcttctaccaagtacaacgagaagtttaag | |
| K8- | | MTADKSTSTAYMELRSLRSDDTA | | ggacgagtgacaatgaccgccgacaagtccacaagcaccgcctacatggagctcagatccctcag | |
| IgG1- | | VYYCASYYGSYFDYWGQGTTVTV | | gagcgatgataccgcagtctactattgcgcctcttattacgggtcctacttcgactattggggtc | |
| K322A | | SSASTKGPSVFPLAPSSKSTSGG | | agggaacaacggttacagtctcttccgcctctactaaaggcccttctgtgtttcctctggctcca | |
| | | TAALGQLVKDYFPEPVTVSWNSG | | tcctctaagtcaaccagcggcggtactgctgctcttggctgtctggtgaaagactacttccccga | |
| | | ALTSGVHTFPAVLQSSGLYSLSS | | accagtgaccgtgagttggaacagtggcgcattgacaagcggagtacacacctttccagcagtgt | |
| | | VVTVPSSSLGTQTYICNVNHKPS | | tgcagtccagcggcctgtatagcctttcctctgtggtgactgtgccctcaagtagcctgggaacg | |
| | | NTKVDKKVEPKSCDKTHTCPPCP | | cagacatacatctgtaacgtcaatcataagccctccaataccaaggtcgataagaaggtggaacc | |
| | | APELLGGPSVFLFPPKPKDTLMI | | caagtcttgcgacaaaacccatacttgtcctccctgtccagcacccgaactgctgggtggaccct | |
| | | SRTPEVTCVVVDVSHEDPEVKFN | | ccgtatttctctttccacccaaacccaaagacaccctgatgatttcccgcactcctgaggttaca | |
| | | WYVDGVEVHNAKTKPREEQYNST | | tgcgttgtggttgatgtgtctcatgaagatccagaggtgaagttcaactggtatgtggacggagt | |
| | | YRVVSVLTVLHQDWLNGKEYKCA | | agaggttcacaatgctaagactaaaccccgtgaggagcaatataattccacctatcgggtggtta | |
| | | VSNKALPAPIEKTISKAKGQPRE | | gcgtgctgacagtcctgcatcaggattggctgaatgggaaggagtacaaatgcgccgtaagcaac | |
| | | PQVYTLPPSRDELTKNQVSLTCL | | aaagccttgcctgccccaatagagaaaactatcagcaaggccaagggtcagcccagagaacctca | |
| | | VKGFYPSDIAVEWESNGQPENNY | | agtctatactctgcctccatcacgggatgaacttaccaagaatcaggtgtctctgacctgtctgg | |
| | | KTTPPVLDSDGSFFLYSKLTVDK | | tcaagggcttctatccatctgacattgccgtagagtgggaaagtaatggtcagcccgaaaacaac | |
| | | SRWQQGNVFSCSVMHEALHNHYT | | tacaaaacaactcctccagtcttggatagtgacggaagcttcttcctttactccaagctgacagt | |
| | | QKSLSLSPGK | | ggacaaatcacgatggcagcagggcaacgtattcagttgcagcgtcatgcacgaggctctccaca | |
| | | | | accactacacccagaaaagtctgtctttgtcacctggcaaa | |
| | Light | DIQMTQSPSSLSASVGDRVTITC | 179 | gacattcagatgacccaatctccatcttccctgtctgcttcagtcggagatcgggtcactatcac | 180 |
| | Chain | RASQDISNYLNWYQQKPDGTVKL | | ctgtagagccagtcaggacataagcaactacctgaactggtatcagcagaaacccgatggtaccg | |
| | | LIYSTSRLHSGVPSRFSGSGSGT | | tgaaactcctgatctatagcactagcaggctgcattccggtgttccatccaggttttctggctcc | |
| | | DYTLTISSLQPEDFATYYCQQGS | | ggttcaggcacagactacacgctcactatcagttcactgcaacctgaggatttcgccacatacta | |
| | | TLPFTFGQGTKLEIKRTVAAPSV | | ctgccagcaaggctcaacactgccctttacctttgggcaaggcaccaagttggagattaagcgga | |
| | | FIFPPSDEQLKSGTASVVCLLNN | | cagtggctgcacctagtgtgttcatctttcctcccagcgatgagcagctgaaatccgggacagct | |
| | | FYPREAKVQWKVDNALQSGNSQE | | tctgtggtgtgcttgctgaacaacttctatccacgagaagctaaggtccagtggaaggtagacaa | |
| | | SVTEQDSKDSTYSLSSTLTLSKA | | tgcccttcagtccggcaattcccaggagagtgttaccgaacaggacagcaaggactctacttaca | |
| | | DYEKHKVYACEVTHQGLSSPVTK | | gcctgtctagcacgcttaccctgtccaaagccgattacgagaagcacaaagtgtatgcctgtgaa | |
| | | SFNRGEC | | gtgacacatcaggggcttagttcacccgtaaccaagagcttcaatcgtggagaatgc | |
| human- | Heavy | QVQLVQSGPEVKKPGASVKIPCK | 181 | caggttcagctggtccaatccgggcccgaggttaagaagcccggagctagcgtcaagataccctg | 182 |
| ized | Chain | ASGYTFTDYNVDWVRQVPGQGLE | | caaagctagtggctataccttcacagactacaatgtagactgggttcggcaagtacccggtcagg | |
| HM297- | | WMGDIDPNNGGTIYNQKFKDRVT | | gcttggagtggatgggagatatcgaccccaataatggagggactatctacaaccagaaattcaag | |
| H5- | | MTVDKSTRTAYMELRSLRSDDTA | | gatcgtgtcacaatgacggtggacaagagtacaaggaccgcctacatggagctgcgaagcttgcg | |
| IgG1- | | VYYCARWRGAMDYWGQGTLVTVS | | ctctgacgatacagccgtctactactgtgctaggtggagaggtgccatggactattggggccagg | |
| K322A | | SASTKGPSVFPLAPSSKSTSGGT | | gcaccctggtaaccgtgtcatctgcctctaccaaaggtcccagcgtgtttcctctcgccccatca | |
| | | AALGCLVKDYFPEPVTVSWNSGA | | agcaagagcacatcaggtgggactgctgcactggggtgtttggtcaaggattacttccctgagcc | |
| | | LTSGVHTFPAVLQSSGLYSLSSV | | agtgacggtatcatggaactccggagcccttaccagcggagtgcatacttttcccgctgtgctgc | |
| | | VTVPSSSLGTQTYIGNVNHKPSN | | aatcctccggcttgtatagcctttcttctgtggtcactgtgccttcttcctcactgggcacccag | |
| | | TKVDKKVEPKSCDKTHTCPPCPA | | acctacatttgcaacgtcaaccacaagccatcaaataccaaagtcgacaagaaagtggaaccaaa | |
| | | PELLGGPSVFLFPPKPKDTLMIS | | atcttgcgacaaaacacacacttgccctccctgtcccgcacccgaactgctgggaggccctagcg | |
| | | RTPEVTCVVVDVSHEDPEVKFNW | | tatttctctttccaccaaagcccaaggatactctgatgatcagccgaactcctgaggttacttgc | |
| | | YVDGVEVHNAKTKPREEQYNSTY | | gtcgtggtggatgtgagtcacgaggatccagaggtgaagttcaactggtatgtggatggtgtcga | |
| | | RVVSVLTVLHQDWLNGKEYKCAV | | agtacacaatgccaagaccaaacccagagaggaacagtataactccacctatcgggtggtgtctg | |
| | | SNKALPAPIEKTISKAKGQPREP | | ttcttaccgttctgcatcaggattggctcaatggaaaggagtacaagtgtgcagtgtccaacaag | |
| | | QVYTLPPSRDELTKNQVSLTQLV | | gcactgcctgctcctatcgaaaagacgatcagtaaagccaaaggccagccacgggaaccacaggt | |
| | | KGFYPSDIAVEWESNGQPENNYK | | gtacacactgcctccatctagggatgagctgactaagaaccaggttagcctgacctgtctggtca | |
| | | TTPPVLDSDGSFFLYSKLTVDKS | | aggggttctatccttcagacattgccgtggaatgggaaagcaatggtcagcccgagaacaactac | |
| | | RWQQGNVFSCSVMHEALHNHYTQ | | aagacaaccccacccgtcctggattccgacggctccttctttctgtactccaaactgacagtgga | |
| | | KSLSLSPGK | | caaaagtagatggcaacaggggaatgtgtttagttgctctgtgatgcatgaggcccttcacaatc | |
| | | | | actatacacagaaatccctctccttgtcccctggaaag | |
| | Light | DIQMTQSPSSLSASVGDRVTITC | 183 | gacatccagatgacccagtcaccatcctctctgtccgcaagtgtgggtgatagggtgacgattac | 184 |
| | Chain | RASQDIDNYLKWYQQKPDGTVKL | | ctgtcgtgcctcacaagacatcgacaactacctcaagtggtaccagcagaaacccgatggaaccg | |
| | | LIYDTSRLHSGVPSRFSGSGSGT | | ttaaactgctgatctacgatacctcacgccttcattctggcgtaccaagccggttttctggctct | |
| | | DYTLTISSLKQEDFATYYCQQGY | | ggcagtggcactgactacacacttaccatttcctccttgaaacaggaggattttgccacctacta | |
| | | TLPWTFGQGTKLEIKRTVAAPSV | | ttgccagcaagggtacacactgccttggacttttgggcaaggaacgaagttggagataaagcgga | |
| | | FIFPPSDEQLKSGTASVVCLLNN | | ctgttgctgctcctagcgtgttcatcttcccacccagtgacgaacagctcaagagcggtactgct | |
| | | FYPREAKVQWKVDNALQSGNSQE | | agcgtggtctgcttgctgaacaacttctatcccagagaggctaaagtgcagtggaaggtcgataa | |
| | | SVTEQDSKDSTYSLSSTLTLSKA | | tgccctccagtctgggaatagccaggaatccgtgactgaacaggactccaaggacagtacctata | |
| | | DYEKHKVYACEVTHQGLSSPVTK | | gcctgtctagcacactgacactgtcaaaagccgattatgagaagcacaaggtctatgcctgtgag | |
| | | SFNRGEC | | gtaacacaccaaggcctttcctctcctgtgacaaagagtttcaatcgaggagaatgc | |
| human- | Heavy | QVQLVQSGPEVKKPGASVKVVCK | 185 | caggtgcagttggtccagagtggaccagaggtgaagaagcctggggccagtgtgaaggtggtctg | 186 |
| ized | Chain | ASGYTFTSYYIQWVKQRPGQGLE | | caaggcatcaggatacacgtttaccagctattacatccagtgggtgaagcaacgtcctggtcagg | |
| HM242- | | WIGWIYPGDGTTKYNEKFKGRVT | | gacttgaatggattgggtggatttaccccggtgatggcactactaagtacaatgagaagttcaaa | |
| C3- | | MTIDKSTRTAYMELRSLRSDDTA | | ggacgagtcaccatgaccatcgataagtcaactcgcacagcctatatggagctgagaagtctgcg | |
| X2-K | | VYYCASYYGSYFDYWGQGTLVTV | | ctctgacgatacagctgtgtattactgcgcctcctactatgggtcctacttcgactattggggcc | |
| | | SSASTKGPSVFPLAPSSKSTSGG | | agggcactctggtcaccgtgtctagtgcctccaccaaaggcccctctgtgtttccactggcacca | |
| | | TAALGQLVKDYFPEPVTVSWNSG | | agctcaaagtcaaccagtggtggaaccgctgctctgggctgtctggttaaggactatttccccga | |
| | | ALTSGVHTFPAVLQSSGLYSLSS | | acctgtaaccgtaagctggaatagtggcgcactgacctccggggtccacacatttcccgccgtgc | |
| | | VVTVPSSSLGTQTYICNVNHKPS | | tgcagagttcaggcctctattccctcagctccgtcgtgactgtcccctcctcttcccttggtact | |
| | | NTKVDKKVEPKSCDKTHTCPPCP | | cagacttacatctgcaacgtgaaccacaagccctccaacaccaaggtggacaagaaggtcgagcc | |
| | | APELLDGPSVFLFPPKPKDTLMI | | caagtcctgcgacaagacccacacctgccccccctgccccgcccccgagctgctggacggcccct | |
| | | SRTPEVTCVVVDVSDEDPEVKFN | | ccgtgttcctgttcccccccaagcccaaggacaccctgatgatctccaggacccccgaggtgacc | |
| | | WYVDGVEVHNAKTKPREEQYNST | | tgcgtggtggtggacgtgtccgacgaggaccccgaggtgaagttcaactggtacgtggacggcgt | |
| | | YRVVSVLTVLHQDWLNGKEYKCA | | ggaggtgcacaacgccaagaccaagcccagggaggagcagtacaactccacctacagggtggtgt | |
| | | VSNKALPAPIEKTISKAKGQPRE | | ccgtgctgaccgtgctgcaccaggactggctgaacggcaaggagtacaagtgcgccgtgtccaac | |
| | | PQVYTLPPSRDELTKNQVSLTCL | | aaggccctgcccgcccccatcgagaagaccatctccaaggccaagggccagcccagggagcccca | |
| | | VKGFYPSDIAVEWESNGQPENNY | | ggtgtacaccctgcccccctccagggacgagctgaccaagaaccaggtgtccctgacctgcctgg | |
| | | KTTPPVLDSDGSFFLYSKLTVDK | | tgaagggcttctacccctccgacatcgccgtggagtgggagtccaacggccagcccgagaacaac | |
| | | SRWQQGNVFSCSVMHEALHNHYT | | tacaagaccaccccccccgtgctggactccgacggctccttcttcctgtactccaagctgaccgt | |
| | | QKSLSLSPGK | | ggacaagtccaggtggcagcagggcaacgtgttctcctgctccgtgatgcacgaggccctgcaca | |
| | | | | accactacacccagaagtccctgtccctgtcccccggcaag | |
| | Light | DIQMTQSPSSLSASVGDRVTITC | 187 | gacattcagatgacccaaagccctagtagcctttccgcttcagttggcgatagggtcaccattac | 188 |
| | Chain | RASQDISNYLNWYQQKPGKAPKL | | gtgtcgagctagccaggatatctcaaactacctgaattggtatcagcagaaacctggcaaagccc | |
| | | LIYYTSKLHSGVPSRFSGSGSGT | | ctaagctgctgatctactacactagtaagctgcatagcggagttccctctaggttctccggaagc | |
| | | DYTLTISSLQPEDFATYYCQQSS | | ggttcagggacagactataccctgaccattagctccttgcaaccagaggactttgctacctacta | |
| | | TLPFTFGQGTKLEIKRTVAAPSV | | ttgccagcagtctagtactcttccctttacctttggccagggtactaagctggagatcaaacgga | |
| | | FIFPPSDEQLKSGTASVVCLLNN | | cggttgcagcaccatccgtctttatcttcccaccttctgacgagcagctcaagtccggtactgcc | |
| | | FYPREAKVQWKVDNALQSGNSQE | | tccgtagtgtgtctcctgaacaacttctatcccagagaagccaaggtgcagtggaaagtggacaa | |
| | | SVTEQDSKDSTYSLSSTLTLSKA | | tgctctgcagtctgggaacagtcaagagtctgtgactgaacaggattccaaggatagcacctact | |
| | | DYEKHKVYACEVTHQGLSSPVTK | | ccttgagttctacccttacactgtcaaaagccgactacgagaagcacaaggtgtatgcctgcgaa | |
| | | SFNRGEC | | gtcacacaccaagggttgtcatctcccgtgacaaagtccttcaatcgtggcgaatgc | |
| human- | Heavy | QVQLVQSGPEVKKPGASVKVVCK | 189 | caggtgcagttggtccagagtggaccagaggtgaagaagcctggggccagtgtgaaggtggtctg | 190 |
| ized | Chain | ASGYTFTSYYIQWVKQRPGQGLE | | caaggcatcaggatacacgtttaccagctattacatccagtgggtgaagcaacgtcctggtcagg | |
| HM242- | | WIGWIYPGDGTTKYNEKFKGRVT | | gacttgaatggattgggtggatttaccccggtgatggcactactaagtacaatgagaagttcaaa | |
| C3- | | MTIDKSTRTAYMELRSLRSDDTA | | ggacgagtcaccatgaccatcgataagtcaactcgcacagcctatatggagctgagaagtctgcg | |
| X3-K | | VYYCASYYGSYFDYWGQGTLVTV | | ctctgacgatacagctgtgtattactgcgcctcctactatgggtcctacttcgactattggggcc | |
| | | SSASTKGPSVFPLAPSSKSTSGG | | agggcactctggtcaccgtgtctagtgcctccaccaaaggcccctctgtgtttccactggcacca | |
| | | TAALGCLVKDYFPEPVTVSWNSG | | agctcaaagtcaaccagtggtggaaccgctgctctgggctgtctggttaaggactatttccccga | |
| | | ALTSGVHTFPAVLQSSGLYSLSS | | acctgtaaccgtaagctggaatagtggcgcactgacctccggggtccacacatttcccgccgtgc | |
| | | VVTVPSSSLGTQTYICNVNHKPS | | tgcagagttcaggcctctattccctcagctccgtcgtgactgtcccctcctcttcccttggtact | |
| | | NTKVDKKVEPKSCDKTHTCPPCP | | cagacttacatctgcaacgtgaaccacaagccctccaacaccaaggtggacaagaaggtcgagcc | |
| | | APELLGGPDVFLFPPKPKDTLMI | | caagtcctgcgacaagacccacacctgccccccctgccccgcccccgagctgctgggcggccccg | |
| | | SRTPEVTCVVVDVSDEDPEVKFN | | acgtgttcctgttcccccccaagcccaaggacaccctgatgatctccaggacccccgaggtgacc | |
| | | WYVDGVEVHNAKTKPREEQYNST | | tgcgtggtggtggacgtgagtgacgaggaccccgaggtgaagttcaactggtacgtggacggcgt | |
| | | YRVVSVLTVLHQDWLNGKEYKCA | | ggaggtgcacaacgccaagaccaagcccagggaggagcagtacaactccacctacagggtggtgt | |
| | | VSNKALPAPIEKTISKAKGQPRE | | ccgtgctgaccgtgctgcaccaggactggctgaacggcaaggagtacaagtgcgccgtgtccaac | |
| | | PQVYTLPPSRDELTKNQVSLTCL | | aaggccctgcccgcccccatcgagaagaccatctccaaggccaagggccagcccagggagcccca | |
| | | VKGFYPSDIAVEWESNGQPENNY | | ggtgtacaccctgcccccctccagggacgagctgaccaagaaccaggtgtccctgacctgcctgg | |
| | | KTTPPVLDSDGSFFLYSKLTVDK | | tgaagggcttctacccctccgacatcgccgtggagtgggagtccaacggccagcccgagaacaac | |
| | | SRWQQGNVFSCSVMHEALHNHYT | | tacaagaccaccccccccgtgctggactccgacggctccttcttcctgtactccaagctgaccgt | |
| | | QKSLSLSPGK | | ggacaagtccaggtggcagcagggcaacgtgttctcctgctccgtgatgcacgaggccctgcaca | |
| | | | | accactacacccagaagtccctgtccctgtcccccggcaag | |
| | Light | DIQMTQSPSSLSASVGDRVTITC | 191 | gacattcagatgacccaaagccctagtagcctttccgcttcagttggcgatagggtcaccattac | 192 |
| | Chain | RASQDISNYLNWYQQKPGKAPKL | | gtgtcgagctagccaggatatctcaaactacctgaattggtatcagcagaaacctggcaaagccc | |
| | | LIYYTSKLHSGVPSRFSGSGSGT | | ctaagctgctgatctactacactagtaagctgcatagcggagttccctctaggttctccggaagc | |
| | | DYTLTISSLQPEDFATYYCQQSS | | ggttcagggacagactataccctgaccattagctccttgcaaccagaggactttgctacctacta | |
| | | TLPFTFGQGTKLEIKRTVAAPSV | | ttgccagcagtctagtactcttccctttacctttggccagggtactaagctggagatcaaacgga | |
| | | FIFPPSDEQLKSGTASVVQLLNN | | cggttgcagcaccatccgtctttatcttcccaccttctgacgagcagctcaagtccggtactgcc | |
| | | FYPREAKVQWKVDNALQSGNSQE | | tccgtagtgtgtctcctgaacaacttctatcccagagaagccaaggtgcagtggaaagtggacaa | |
| | | SVTEQDSKDSTYSLSSTLTLSKA | | tgctctgcagtctgggaacagtcaagagtctgtgactgaacaggattccaaggatagcacctact | |
| | | DYEKHKVYACEVTHQGLSSPVTK | | ccttgagttctacccttacactgtcaaaagccgactacgagaagcacaaggtgtatgcctgcgaa | |
| | | SFNRGEC | | gtcacacaccaagggttgtcatctcccgtgacaaagtccttcaatcgtggcgaatgc | |
| human- | Heavy | QVQLVQSGPEVKKPGASVKVVCK | 193 | caggtgcagttggtccagagtggaccagaggtgaagaagcctggggccagtgtgaaggtggtctg | 194 |
| ized | Chain | ASGYTFTSYYIQWVKQRPGQGLE | | caaggcatcaggatacacgtttaccagctattacatccagtgggtgaagcaacgtcctggtcagg | |
| HM242- | | WIGWIYPGDGTTKYNEKFKGRVT | | gacttgaatggattgggtggatttaccccggtgatggcactactaagtacaatgagaagttcaaa | |
| C3- | | MTIDKSTRTAYMELRSLRSDDTA | | ggacgagtcaccatgaccatcgataagtcaactcgcacagcctatatggagctgagaagtctgcg | |
| X3-KE | | VYYCASYYGSYFDYWGQGTLVTV | | ctctgacgatacagctgtgtattactgcgcctcctactatgggtcctacttcgactattggggcc | |
| | | SSASTKGPSVFPLAPSSKSTSGG | | agggcactctggtcaccgtgtctagtgcctccaccaaaggcccctctgtgtttccactggcacca | |
| | | TAALGCLVKDYFPEPVTVSWNSG | | agctcaaagtcaaccagtggtggaaccgctgctctgggctgtctggttaaggactatttccccga | |
| | | ALTSGVHTFPAVLQSSGLYSLSS | | acctgtaaccgtaagctggaatagtggcgcactgacctccggggtccacacatttcccgccgtgc | |
| | | VVTVPSSSLGTQTYICNVNHKPS | | tgcagagttcaggcctctattccctcagctccgtcgtgactgtcccctcctcttcccttggtact | |
| | | NTKVDKKVEPKSCDKTHTCPPCP | | cagacttacatctgcaacgtgaaccacaagccctccaacaccaaggtggacaagaaggtcgagcc | |
| | | APELLGGPDVFLFPPKPKDTLMI | | caagtcctgcgacaagacccacacctgccccccctgccccgcccccgagctgctgggcggccccg | |
| | | SRTPEVTCVVVDVSDEDPEVKFN | | acgtgttcctgttcccccccaagcccaaggacaccctgatgatctccaggacccccgaggtgacc | |
| | | WYVDGVEVHNAKTKPRAEQYNST | | tgcgtggtggtggacgtgagtgacgaggaccccgaggtgaagttcaactggtacgtggacggcgt | |
| | | YRVVSVLTVLHQDWLNGKEYKCA | | ggaggtgcacaacgccaagaccaagcccagggccgagcagtacaactccacctacagggtggtgt | |
| | | VSNKALPAPIEKTISKAKGQPRE | | ccgtgctgaccgtgctgcaccaggactggctgaacggcaaggagtacaagtgcgccgtgtccaac | |
| | | PQVYTLPPSRDELTKNQVSLTCL | | aaggccctgcccgcccccatcgagaagaccatctccaaggccaagggccagcccagggagcccca | |
| | | VKGFYPSDIAVEWESNGQPENNY | | ggtgtacaccctgcccccctccagggacgagctgaccaagaaccaggtgtccctgacctgcctgg | |
| | | KTTPPVLDSDGSFFLYSKLTVDK | | tgaagggcttctacccctccgacatcgccgtggagtgggagtccaacggccagcccgagaacaac | |
| | | SRWQQGNVFSCSVMHEALHNHYT | | tacaagaccaccccccccgtgctggactccgacggctccttcttcctgtactccaagctgaccgt | |
| | | QKSLSLSPGK | | ggacaagtccaggtggcagcagggcaacgtgttctcctgctccgtgatgcacgaggccctgcaca | |
| | | | | accactacacccagaagtccctgtccctgtcccccggcaag | |
| | Light | DIQMTQSPSSLSASVGDRVTITC | 195 | gacattcagatgacccaaagccctagtagcctttccgcttcagttggcgatagggtcaccattac | 196 |
| | Chain | RASQDISNYLNWYQQKPGKAPKL | | gtgtcgagctagccaggatatctcaaactacctgaattggtatcagcagaaacctggcaaagccc | |
| | | LIYYTSKLHSGVPSRFSGSGSGT | | ctaagctgctgatctactacactagtaagctgcatagcggagttccctctaggttctccggaagc | |
| | | DYTLTISSLQPEDFATYYCQQSS | | ggttcagggacagactataccctgaccattagctccttgcaaccagaggactttgctacctacta | |
| | | TLPFTFGQGTKLEIKRTVAAPSV | | ttgccagcagtctagtactcttccctttacctttggccagggtactaagctggagatcaaacgga | |
| | | FIFPPSDEQLKSGTASVVCLLNN | | cggttgcagcaccatccgtctttatcttcccaccttctgacgagcagctcaagtccggtactgcc | |
| | | FYPREAKVQWKVDNALQSGNSQE | | tccgtagtgtgtctcctgaacaacttctatcccagagaagccaaggtgcagtggaaagtggacaa | |
| | | SVTEQDSKDSTYSLSSTLTLSKA | | tgctctgcagtctgggaacagtcaagagtctgtgactgaacaggattccaaggatagcacctact | |
| | | DYEKHKVYACEVTHQGLSSPVTK | | ccttgagttctacccttacactgtcaaaagccgactacgagaagcacaaggtgtatgcctgcgaa | |
| | | SFNRGEC | | gtcacacaccaagggttgtcatctcccgtgacaaagtccttcaatcgtggcgaatgc | |
| human- | Heavy | QVQLVQSGPEVKKPGASVKVVCK | 197 | caggtgcagttggtccagagtggaccagaggtgaagaagcctggggccagtgtgaaggtggtctg | 198 |
| ized | Chain | ASGYTFTSYYIQWVKQRPGQGLE | | caaggcatcaggatacacgtttaccagctattacatccagtgggtgaagcaacgtcctggtcagg | |
| HM242- | | WIGWIYPGDGTTKYNEKFKGRVT | | gacttgaatggattgggtggatttaccccggtgatggcactactaagtacaatgagaagttcaaa | |
| C3- | | MTIDKSTRTAYMELRSLRSDDTA | | ggacgagtcaccatgaccatcgataagtcaactcgcacagcctatatggagctgagaagtctgcg | |
| X3-KI | | VYYCASYYGSYFDYWGQGTLVTV | | ctctgacgatacagctgtgtattactgcgcctcctactatgggtcctacttcgactattggggcc | |
| | | SSASTKGPSVFPLAPSSKSTSGG | | agggcactctggtcaccgtgtctagtgcctccaccaaaggcccctctgtgtttccactggcacca | |
| | | TAALGQLVKDYFPEPVTVSWNSG | | agctcaaagtcaaccagtggtggaaccgctgctctgggctgtctggttaaggactatttccccga | |
| | | ALTSGVHTFPAVLQSSGLYSLSS | | acctgtaaccgtaagctggaatagtggcgcactgacctccggggtccacacatttcccgccgtgc | |
| | | VVTVPSSSLGTQTYICNVNHKPS | | tgcagagttcaggcctctattccctcagctccgtcgtgactgtcccctcctcttcccttggtact | |
| | | NTKVDKKVEPKSCDKTHTCPPCP | | cagacttacatctgcaacgtgaaccacaagccctccaacaccaaggtggacaagaaggtcgagcc | |
| | | APELLGGPDVFLFPPKPKDTLMI | | caagtcctgcgacaagacccacacctgccccccctgccccgcccccgagctgctgggcggccccg | |
| | | SRTPEVTCVVVDVSDEDPEVKFN | | acgtgttcctgttcccccccaagcccaaggacaccctgatgatctccaggacccccgaggtgacc | |
| | | WYVDGVEVHNAKTKPREEQYNST | | tgcgtggtggtggacgtgTCCgacgaggaccccgaggtgaagttcaactggtacgtggacggcgt | |
| | | YRVVSVLTVLHQDWLNGKEYKCA | | ggaggtgcacaacgccaagaccaagcccagggaggagcagtacaactccacctacagggtggtgt | |
| | | VSNKALPAPEEKTISKAKGQPRE | | ccgtgctgaccgtgctgcaccaggactggctgaacggcaaggagtacaagtgcgccgtgtccaac | |
| | | PQVYTLPPSRDELTKNQVSLTCL | | aaggccctgcccgcccccGAGgagaagaccatctccaaggccaagggccagcccagggagcccca | |
| | | VKGFYPSDIAVEWESNGQPENNY | | ggtgtacaccctgcccccctccagggacgagctgaccaagaaccaggtgtccctgacctgcctgg | |
| | | KTTPPVLDSDGSFFLYSKLTVDK | | tgaagggcttctacccctccgacatcgccgtggagtgggagtccaacggccagcccgagaacaac | |
| | | SRWQQGNVFSCSVMHEALHNHYT | | tacaagaccaccccccccgtgctggactccgacggctccttcttcctgtactccaagctgaccgt | |
| | | QKSLSLSPGK | | ggacaagtccaggtggcagcagggcaacgtgttctcctgctccgtgatgcacgaggccctgcaca | |
| | | | | accactacacccagaagtccctgtcactgtcccccggcaag | |
| | Light | DIQMTQSPSSLSASVGDRVTITC | 199 | gacattcagatgacccaaagccctagtagcctttccgcttcagttggcgatagggtcaccattac | 200 |
| | Chain | RASQDISNYLNWYQQKPGKAPKL | | gtgtcgagctagccaggatatctcaaactacctgaattggtatcagcagaaacctggcaaagccc | |
| | | LIYYTSKLHSGVPSRFSGSGSGT | | ctaagctgctgatctactacactagtaagctgcatagcggagttccctctaggttctccggaagc | |
| | | DYTLTISSLQPEDFATYYCQQSS | | ggttcagggacagactataccctgaccattagctccttgcaaccagaggactttgctacctacta | |
| | | TLPFTFGQGTKLEIKRTVAAPSV | | ttgccagcagtctagtactcttccctttacctttggccagggtactaagctggagatcaaacgga | |
| | | FIFPPSDEQLKSGTASVVCLLNN | | cggttgcagcaccatccgtctttatcttcccaccttctgacgagcagctcaagtccggtactgcc | |
| | | FYPREAKVQWKVDNALQSGNSQE | | tccgtagtgtgtctcctgaacaacttctatcccagagaagccaaggtgcagtggaaagtggacaa | |
| | | SVTEQDSKDSTYSLSSTLTLSKA | | tgctctgcagtctgggaacagtcaagagtctgtgactgaacaggattccaaggatagcacctact | |
| | | DYEKHKVYACEVTHQGLSSPVTK | | ccttgagttctacccttacactgtcaaaagccgactacgagaagcacaaggtgtatgcctgcgaa | |
| | | SFNRGEC | | gtcacacaccaagggttgtcatctcccgtgacaaagtccttcaatcgtggcgaatgc | |
| human- | Heavy | QVQLVQSGPEVKKPGASVKVVCK | 201 | caggtgcagttggtccagagtggaccagaggtgaagaagcctggggccagtgtgaaggtggtctg | 202 |
| ized | Chain | ASGYTFTSYYIQWVKQRPGQGLE | | caaggcatcaggatacacgtttaccagctattacatccagtgggtgaagcaacgtcctggtcagg | |
| HM242- | | WIGWIYPGQGTTKYNEKFKGRVT | | gacttgaatggattgggtggatttaccccggtgatggcactactaagtacaatgagaagttcaaa | |
| C3- | | MTIDKSTRTAYMELRSLRSDDTA | | ggacgagtcaccatgaccatcgataagtcaactcgcacagcctatatggagctgagaagtctgcg | |
| X3-KL | | VYYCASYYGSYFDYWGQGTLVTV | | ctctgacgatacagctgtgtattactgcgcctcctactatgggtcctacttcgactattggggcc | |
| | | SSASTKGPSVFPLAPSSKSTSGG | | agggcactctggtcaccgtgtctagtgcctccaccaaaggcccctctgtgtttccactggcacca | |
| | | TAALGQLVKDYFPEPVTVSWNSG | | agctcaaagtcaaccagtggtggaaccgctgctctgggctgtctggttaaggactatttccccga | |
| | | ALTSGVHTFPAVLQSSGLYSLSS | | acctgtaaccgtaagctggaatagtggcgcactgacctccggggtccacacatttcccgccgtgc | |
| | | VVTVPSSSLGTQTYICNVNHKPS | | tgcagagttcaggcctctattccctcagctccgtcgtgactgtcccctcctcttcccttggtact | |
| | | NTKVDKKVEPKSCDKTHTCPPCP | | cagacttacatctgcaacgtgaaccacaagccctccaacaccaaggtggacaagaaggtcgagcc | |
| | | APELLGGPDVFLFPPKPKQTLMI | | caagtcctgcgacaagacccacacctgccccccctgccccgcccccgagctgctgggcggccccg | |
| | | SRTPEVTCVVVDVSDEDPEVKFN | | acgtgttcctgttcccccccaagcccaaggacaccctgatgatctccaggacccccgaggtgacc | |
| | | WYVDGVEVHNAKTKPREEQYNST | | tgcgtggtggtggacgtgTCGgacgaggaccccgaggtgaagttcaactggtacgtggacggcgt | |
| | | YRVVSVLTVLHQDWLNGKEYKCA | | ggaggtgcacaacgccaagaccaagcccagggaggagcagtacaactccacctacagggtggtgt | |
| | | VSNKAYPAPIEKTISKAKGQPRE | | ccgtgctgaccgtgctgcaccaggactggctgaacggcaaggagtacaagtgcgccgtgtccaac | |
| | | PQVYTLPPSRDELTKNQVSLTCL | | aaggccTACcccgcccccatcgagaagaccatctccaaggccaagggccagcccagggagcccca | |
| | | VKGFYPSDIAVEWESNGQPENNY | | ggtgtacaccctgcccccctccagggacgagctgaccaagaaccaggtgtccctgacctgcctgg | |
| | | KTTPPVLDSDGSFFLYSKLTVDK | | tgaagggcttctacccctccgacatcgccgtggagtgggagtccaacggccagcccgagaacaac | |
| | | SRWQQGNVFSGSVMHEALHNHYT | | tacaagaccaccccccccgtgctggactccgacggctccttcttcctgtactccaagctgaccgt | |
| | | QKSLSLSPGK | | ggacaagtccaggtggcagcagggcaacgtgttctcctgctccgtgatgcacgaggccctgcaca | |
| | | | | accactacacccagaagtccctgtccctgtcccccggcaag | |
| | Light | DIQMTQSPSSLSASVGDRVTITC | 203 | gacattcagatgacccaaagccctagtagcctttccgcttcagttggcgatagggtcaccattac | 204 |
| | Chain | RASQDISNYLNWYQQKPGKAPKL | | gtgtcgagctagccaggatatctcaaactacctgaattggtatcagcagaaacctggcaaagccc | |
| | | LIYYTSKLHSGVPSRFSGSGSGT | | ctaagctgctgatctactacactagtaagctgcatagcggagttccctctaggttctccggaagc | |
| | | DYTLTISSLQPEDFATYYCQQSS | | ggttcagggacagactataccctgaccattagctccttgcaaccagaggactttgctacctacta | |
| | | TLPFTFGQGTKLEIKRTVAAPSV | | ttgccagcagtctagtactcttccctttacctttggccagggtactaagctggagatcaaacgga | |
| | | FIFPPSDEQLKSGTASVVCLLNN | | cggttgcagcaccatccgtctttatcttcccaccttctgacgagcagctcaagtccggtactgcc | |
| | | FYPREAKVQWKVDNALQSGNSQE | | tccgtagtgtgtctcctgaacaacttctatcccagagaagccaaggtgcagtggaaagtggacaa | |
| | | SVTEQDSKDSTYSLSSTLTLSKA | | tgctctgcagtctgggaacagtcaagagtctgtgactgaacaggattccaaggatagcacctact | |
| | | DYEKHKVYACEVTHQGLSSPVTK | | ccttgagttctacccttacactgtcaaaagccgactacgagaagcacaaggtgtatgcctgcgaa | |
| | | SFNRGEC | | gtcacacaccaagggttgtcatctcccgtgacaaagtccttcaatcgtggcgaatgc | |
| human- | Heavy | QVQLVQSGPEVKKPGASVKVVCK | 205 | caggtgcagttggtccagagtggaccagaggtgaagaagcctggggccagtgtgaaggtggtctg | 206 |
| ized | Chain | ASGYTFTSYYIQWVKQRPGQGLE | | caaggcatcaggatacacgtttaccagctattacatccagtgggtgaagcaacgtcctggtcagg | |
| HM242- | | WIGWIYPGDGTTKYNEKFKGRVT | | gacttgaatggattgggtggatttaccccggtgatggcactactaagtacaatgagaagttcaaa | |
| C3- | | MTIDKSTRTAYMELRSLRSDDTA | | ggacgagtcaccatgaccatcgataagtcaactcgcacagcctatatggagctgagaagtctgcg | |
| X3-KS | | VYYCASYYGSYFDYWGQGTLVTV | | ctctgacgatacagctgtgtattactgcgcctcctactatgggtcctacttcgactattggggcc | |
| | | SSASTKGPSVFPLAPSSKSTSGG | | agggcactctggtcaccgtgtctagtgcctccaccaaaggcccctctgtgtttccactggcacca | |
| | | TAALGCLVKDYFPEPVTVSWNSG | | agctcaaagtcaaccagtggtggaaccgctgctctgggctgtctggttaaggactatttccccga | |
| | | ALTSGVHTFPAVLQSSGLYSLSS | | acctgtaaccgtaagctggaatagtggcgcactgacctccggggtccacacatttcccgccgtgc | |
| | | VVTVPSSSLGTQTYICNVNHKPS | | tgcagagttcaggcctctattccctcagctccgtcgtgactgtcccctcctcttcccttggtact | |
| | | NTKVDKKVEPKSCDKTHTCPPCP | | cagacttacatctgcaacgtgaaccacaagccctccaacaccaaggtggacaagaaggtcgagcc | |
| | | APELLGGPDVFLFPPKPKQTLMI | | caagtcctgcgacaagacccacacctgccccccctgccccgcccccgagctgctgggcggccccg | |
| | | SRTPEVTCVVVDVGDEDPEVKFN | | acgtgttcctgttcccccccaagcccaaggacaccctgatgatctccaggacccccgaggtgacc | |
| | | WYVDGVEVHNAKTKPREEQYNST | | tgcgtggtggtggacgtgggcgacgaggaccccgaggtgaagttcaactggtacgtggacggcgt | |
| | | YRVVSVLTVLHQDWLNGKEYKCA | | ggaggtgcacaacgccaagaccaagcccagggaggagcagtacaactccacctacagggtggtgt | |
| | | VSNKALPAPIEKTISKAKGQPRE | | ccgtgctgaccgtgctgcaccaggactggctgaacggcaaggagtacaagtgcgccgtgtccaac | |
| | | PQVYTLPPSRDELTKNQVSLTCL | | aaggccctgcccgcccccatcgagaagaccatctccaaggccaagggccagcccagggagcccca | |
| | | VKGFYPSDIAVEWESNGQPENNY | | ggtgtacaccctgcccccctccagggacgagctgaccaagaaccaggtgtccctgacctgcctgg | |
| | | KTTPPVLDSDGSFFLYSKLTVDK | | tgaagggcttctacccctccgacatcgccgtggagtgggagtccaacggccagcccgagaacaac | |
| | | SRWQQGNVFSCSVMHEALHNHYT | | tacaagaccaccccccccgtgctggactccgacggctccttcttcctgtactccaagctgaccgt | |
| | | QKSLSLSPGK | | ggacaagtccaggtggcagcagggcaacgtgttctcctgctccgtgatgcacgaggccctgcaca | |
| | | | | accactacacccagaagtccctgtccctgtcccccggcaag | |
| | Light | DIQMTQSPSSLSASVGDRVTITQ | 207 | gacattcagatgacccaaagccctagtagcctttccgcttcagttggcgatagggtcaccattac | 208 |
| | Chain | RASQDISNYLNWYQQKPGKAPKL | | gtgtcgagctagccaggatatctcaaactacctgaattggtatcagcagaaacctggcaaagccc | |
| | | LIYYTSKLHSGVPSRFSGSGSGT | | ctaagctgctgatctactacactagtaagctgcatagcggagttccctctaggttctccggaagc | |
| | | DYTLTISSLQPEDFATYYCQQSS | | ggttcagggacagactataccctgaccattagctccttgcaaccagaggactttgctacctacta | |
| | | TLPFTFGQGTKLEIKRTVAAPSV | | ttgccagcagtctagtactcttccctttacctttggccagggtactaagctggagatcaaacgga | |
| | | FIFPPSDEQLKSGTASVVCLLNN | | cggttgcagcaccatccgtctttatcttcccaccttctgacgagcagctcaagtccggtactgcc | |
| | | FYPREAKVQWKVDNALQSGNSQE | | tccgtagtgtgtctcctgaacaacttctatcccagagaagccaaggtgcagtggaaagtggacaa | |
| | | SVTEQDSKDSTYSLSSTLTLSKA | | tgctctgcagtctgggaacagtcaagagtctgtgactgaacaggattccaaggatagcacctact | |
| | | DYEKHKVYACEVTHQGLSSPVTK | | ccttgagttctacccttacactgtcaaaagccgactacgagaagcacaaggtgtatgcctgcgaa | |
| | | SFNRGEC | | gtcacacaccaagggttgtcatctcccgtgacaaagtccttcaatcgtggcgaatgc | |
| human- | Heavy | QVQLVQSGPEVKKPGASVKVVCK | 209 | caggtgcagttggtccagagtggaccagaggtgaagaagcctggggccagtgtgaaggtggtctg | 210 |
| ized | Chain | ASGYTFTSYYIQWVKQRPGQGLE | | caaggcatcaggatacacgtttaccagctattacatccagtgggtgaagcaacgtcctggtcagg | |
| HM242- | | WIGWIYPGDGTTKYNEKFKGRVT | | gacttgaatggattgggtggatttaccccggtgatggcactactaagtacaatgagaagttcaaa | |
| C3- | | MTIDKSTRTAYMELRSLRSDDTA | | ggacgagtcaccatgaccatcgataagtcaactcgcacagcctatatggagctgagaagtctgcg | |
| X3-KSI | | VYYCASYYGSYFDYWGQGTLVTV | | ctctgacgatacagctgtgtattactgcgcctcctactatgggtcctacttcgactattggggcc | |
| | | SSASTKGPSVFPLAPSSKSTSGG | | agggcactctggtcaccgtgtctagtgcctccaccaaaggcccctctgtgtttccactggcacca | |
| | | TAALGQLVKDYFPEPVTVSWNSG | | agctcaaagtcaaccagtggtggaaccgctgctctgggctgtctggttaaggactatttccccga | |
| | | ALTSGVHTFPAVLQSSGLYSLSS | | acctgtaaccgtaagctggaatagtggcgcactgacctccggggtccacacatttcccgccgtgc | |
| | | VVTVPSSSLGTQTYICNVNHKPS | | tgcagagttcaggcctctattccctcagctccgtcgtgactgtcccctcctcttcccttggtact | |
| | | NTKVDKKVEPKSCDKTHTCPPCP | | cagacttacatctgcaacgtgaaccacaagccctccaacaccaaggtggacaagaaggtcgagcc | |
| | | APELLGGPDVFLFPPKPKQTLMI | | caagtcctgcgacaagacccacacctgccccccctgccccgcccccgagctgctgggcggccccg | |
| | | SRTPEVTCVVVDVGDEDPEVKFN | | acgtgttcctgttcccccccaagcccaaggacaccctgatgatctccaggacccccgaggtgacc | |
| | | WYVDGVEVHNAKTKPREEQYNST | | tgcgtggtggtggacgtgGGCgacgaggaccccgaggtgaagttcaactggtacgtggacggcgt | |
| | | YRVVSVLTVLHQDWLNGKEYKCA | | ggaggtgcacaacgccaagaccaagcccagggaggagcagtacaactccacctacagggtggtgt | |
| | | VSNKALPAPEEKTISKAKGQPRE | | ccgtgctgaccgtgctgcaccaggactggctgaacggcaaggagtacaagtgcgccgtgtccaac | |
| | | PQVYTLPPSRDELTKNQVSLTCL | | aaggccctgcccgcccccGAGgagaagaccatctccaaggccaagggccagcccagggagcccca | |
| | | VKGFYPSDIAVEWESNGQPENNY | | ggtgtacaccctgcccccctccagggacgagctgaccaagaaccaggtgtccctgacctgcctgg | |
| | | KTTPPVLDSDGSFFLYSKLTVDK | | tgaagggcttctacccctccgacatcgccgtggagtgggagtccaacggccagcccgagaacaac | |
| | | SRWQQGNVFSCSVMHEALHNHYT | | tacaagaccaccccccccgtgctggactccgacggctccttcttcctgtactccaagctgaccgt | |
| | | QKSLSLSPGK | | ggacaagtccaggtggcagcagggcaacgtgttctcctgctccgtgatgcacgaggccctgcaca | |
| | | | | accactacacccagaagtccctgtccctgtcccccggcaag | |
| | Light | DIQMTQSPSSLSASVGDRVTITC | 211 | gacattcagatgacccaaagccctagtagcctttccgcttcagttggcgatagggtcaccattac | 212 |
| | Chain | RASQDISNYLNWYQQKPGKAPKL | | gtgtcgagctagccaggatatctcaaactacctgaattggtatcagcagaaacctggcaaagccc | |
| | | LIYYTSKLHSGVPSRFSGSGSGT | | ctaagctgctgatctactacactagtaagctgcatagcggagttccctctaggttctccggaagc | |
| | | DYTLTISSLQPEDFATYYCQQSS | | ggttcagggacagactataccctgaccattagctccttgcaaccagaggactttgctacctacta | |
| | | TLPFTFGQGTKLEIKRTVAAPSV | | ttgccagcagtctagtactcttccctttacctttggccagggtactaagctggagatcaaacgga | |
| | | FIFPPSDEQLKSGTASVVCLLNN | | cggttgcagcaccatccgtctttatcttcccaccttctgacgagcagctcaagtccggtactgcc | |
| | | FYPREAKVQWKVDNALQSGNSQE | | tccgtagtgtgtctcctgaacaacttctatcccagagaagccaaggtgcagtggaaagtggacaa | |
| | | SVTEQDSKDSTYSLSSTLTLSKA | | tgctctgcagtctgggaacagtcaagagtctgtgactgaacaggattccaaggatagcacctact | |
| | | DYEKHKVYACEVTHQGLSSPVTK | | ccttgagttctacccttacactgtcaaaagccgactacgagaagcacaaggtgtatgcctgcgaa | |
| | | SFNRGEC | | gtcacacaccaagggttgtcatctcccgtgacaaagtccttcaatcgtggcgaatgc | |
| human- | Heavy | QVQLVQSGPEVKKPGASVKVVCK | 213 | caggtgcagttggtccagagtggaccagaggtgaagaagcctggggccagtgtgaaggtggtctg | 214 |
| ized | Chain | ASGYTFTSYYIQWVKQRPGQGLE | | caaggcatcaggatacacgtttaccagctattacatccagtgggtgaagcaacgtcctggtcagg | |
| HM242- | | WIGWIYPGDGTTKYNEKFKGRVT | | gacttgaatggattgggtggatttaccccggtgatggcactactaagtacaatgagaagttcaaa | |
| C3- | | MTIDKSTRTAYMELRSLRSDDTA | | ggacgagtcaccatgaccatcgataagtcaactcgcacagcctatatggagctgagaagtctgcg | |
| X3-KSL | | VYYCASYYGSYFDYWGQGTLVTV | | ctctgacgatacagctgtgtattactgcgcctcctactatgggtcctacttcgactattggggcc | |
| | | SSASTKGPSVFPLAPSSKSTSGG | | agggcactctggtcaccgtgtctagtgcctccaccaaaggcccctctgtgtttccactggcacca | |
| | | TAALGCLVKDYFPEPVTVSWNSG | | agctcaaagtcaaccagtggtggaaccgctgctctgggctgtctggttaaggactatttccccga | |
| | | ALTSGVHTFPAVLQSSGLYSLSS | | acctgtaaccgtaagctggaatagtggcgcactgacctccggggtccacacatttcccgccgtgc | |
| | | VVTVPSSSLGTQTYICNVNHKPS | | tgcagagttcaggcctctattccctcagctccgtcgtgactgtcccctcctcttcccttggtact | |
| | | NTKVDKKVEPKSCDKTHTCPPCP | | cagacttacatctgcaacgtgaaccacaagccctccaacaccaaggtggacaagaaggtcgagcc | |
| | | APELLGGPDVFLFPPKPKQTLMI | | caagtcctgcgacaagacccacacctgccccccctgccccgcccccgagctgctgggcggccccg | |
| | | SRTPEVTCVVVDVGDEDPEVKFN | | acgtgttcctgttcccccccaagcccaaggacaccctgatgatctccaggacccccgaggtgacc | |
| | | WYVDGVEVHNAKTKPREEQYNST | | tgcgtggtggtggacgtgGGCgacgaggaccccgaggtgaagttcaactggtacgtggacggcgt | |
| | | YRVVSVLTVLHQDWLNGKEYKCA | | ggaggtgcacaacgccaagaccaagcccagggaggagcagtacaactccacctacagggtggtgt | |
| | | VSNKAYPAPIEKTISKAKGQPRE | | ccgtgctgaccgtgctgcaccaggactggctgaacggcaaggagtacaagtgcgccgtgtccaac | |
| | | PQVYTLPPSRDELTKNQVSLTCL | | aaggccTACcccgcccccatcgagaagaccatctccaaggccaagggccagcccagggagcccca | |
| | | VKGFYPSDIAVEWESNGQPENNY | | ggtgtacaccctgcccccctccagggacgagctgaccaagaaccaggtgtccctgacctgcctgg | |
| | | KTTPPVLDSDGSFFLYSKLTVDK | | tgaagggcttctacccctccgacatcgccgtggagtgggagtccaacggccagcccgagaacaac | |
| | | SRWQQGNVFSCSVMHEALHNHYT | | tacaagaccaccccccccgtgctggactccgacggctccttcttcctgtactccaagctgaccgt | |
| | | QKSLSLSPGK | | ggacaagtccaggtggcagcagggcaacgtgttctcctgctccgtgatgcacgaggccctgcaca | |
| | | | | accactacacccagaagtccctgtccctgtcccccggcaag | |
| | Light | DIQMTQSPSSLSASVGDRVTITC | 215 | gacattcagatgacccaaagccctagtagcctttccgcttcagttggcgatagggtcaccattac | 216 |
| | Chain | RASQDISNYLNWYQQKPGKAPKL | | gtgtcgagctagccaggatatctcaaactacctgaattggtatcagcagaaacctggcaaagccc | |
| | | LIYYTSKLHSGVPSRFSGSGSGT | | ctaagctgctgatctactacactagtaagctgcatagcggagttccctctaggttctccggaagc | |
| | | DYTLTISSLQPEDFATYYCQQSS | | ggttcagggacagactataccctgaccattagctccttgcaaccagaggactttgctacctacta | |
| | | TLPFTFGQGTKLEIKRTVAAPSV | | ttgccagcagtctagtactcttccctttacctttggccagggtactaagctggagatcaaacgga | |
| | | FIFPPSDEQLKSGTASVVCLLNN | | cggttgcagcaccatccgtctttatcttcccaccttctgacgagcagctcaagtccggtactgcc | |
| | | FYPREAKVQWKVDNALQSGNSQE | | tccgtagtgtgtctcctgaacaacttctatcccagagaagccaaggtgcagtggaaagtggacaa | |
| | | SVTEQDSKDSTYSLSSTLTLSKA | | tgctctgcagtctgggaacagtcaagagtctgtgactgaacaggattccaaggatagcacctact | |
| | | DYEKHKVYACEVTHQGLSSPVTK | | ccttgagttctacccttacactgtcaaaagccgactacgagaagcacaaggtgtatgcctgcgaa | |
| | | SFNRGEC | | gtcacacaccaagggttgtcatctcccgtgacaaagtccttcaatcgtggcgaatgc | |
| human- | Heavy | QVQLVQSGPEVKKPGASVKVVCK | 217 | caggtgcagttggtccagagtggaccagaggtgaagaagcctggggccagtgtgaaggtggtctg | 218 |
| ized | Chain | ASGYTFTSYYIQWVKQRPGQGLE | | caaggcatcaggatacacgtttaccagctattacatccagtgggtgaagcaacgtcctggtcagg | |
| HM242- | | WIGWIYPGDGTTKYNEKFKGRVT | | gacttgaatggattgggtggatttaccccggtgatggcactactaagtacaatgagaagttcaaa | |
| C3- | | MTIDKSTRTAYMELRSLRSDDTA | | ggacgagtcaccatgaccatcgataagtcaactcgcacagcctatatggagctgagaagtctgcg | |
| X4-K | | VYYCASYYGSYFDYWGQGTLVTV | | ctctgacgatacagctgtgtattactgcgcctcctactatgggtcctacttcgactattggggcc | |
| | | SSASTKGPSVFPLAPSSKSTSGG | | agggcactctggtcaccgtgtctagtgcctccaccaaaggcccctctgtgtttccactggcacca | |
| | | TAALGQLVKDYFPEPVTVSWNSG | | agctcaaagtcaaccagtggtggaaccgctgctctgggctgtctggttaaggactatttccccga | |
| | | ALTSGVHTFPAVLQSSGLYSLSS | | acctgtaaccgtaagctggaatagtggcgcactgacctccggggtccacacatttcccgccgtgc | |
| | | VVTVPSSSLGTQTYICNVNHKPS | | tgcagagttcaggcctctattccctcagctccgtcgtgactgtcccctcctcttcccttggtact | |
| | | NTKVDKKVEPKSCDKTHTCPPCP | | cagacttacatctgcaacgtgaaccacaagccctccaacaccaaggtggacaagaaggtcgagcc | |
| | | APELLGGPDVFLFPPKPKQTLMI | | caagtcctgcgacaagacccacacctgccccccctgccccgcccccgagctgctgggcggccccg | |
| | | SRTPEVTCVVVDVSDEDPEVKFN | | acgtgttcctgttcccccccaagcccaaggacaccctgatgatctccaggacccccgaggtgacc | |
| | | WYVDGVEVHNAKTKPREEQYNST | | tgcgtggtggtggacgtgtccgacgaggaccccgaggtgaagttcaactggtacgtggacggcgt | |
| | | YRVVSVLTVLHQDWLNGKEYKCA | | ggaggtgcacaacgccaagaccaagcccagggaggagcagtacaactccacctacagggtggtgt | |
| | | VSNKAYPAPEEKTISKAKGQPRE | | ccgtgctgaccgtgctgcaccaggactggctgaacggcaaggagtacaagtgcgccgtgtccaac | |
| | | PQVYTLPPSRDELTKNQVSLTCL | | aaggcctaccccgcccccgaggagaagaccatctccaaggccaagggccagcccagggagcccca | |
| | | VKGFYPSDIAVEWESNGQPENNY | | ggtgtacaccctgcccccctccagggacgagctgaccaagaaccaggtgtccctgacctgcctgg | |
| | | KTTPPVLDSDGSFFLYSKLTVDK | | tgaagggcttctacccctccgacatcgccgtggagtgggagtccaacggccagcccgagaacaac | |
| | | SRWQQGNVFSCSVMHEALHNHYT | | tacaagaccaccccccccgtgctggactccgacggctccttcttcctgtactccaagctgaccgt | |
| | | QKSLSLSPGK | | ggacaagtccaggtggcagcagggcaacgtgttctcctgctccgtgatgcacgaggccctgcaca | |
| | | | | accactacacccagaagtccctgtccctgtcccccggcaag | |
| | Light | DIQMTQSPSSLSASVGDRVTITC | 219 | gacattcagatgacccaaagccctagtagcctttccgcttcagttggcgatagggtcaccattac | 220 |
| | Chain | RASQDISNYLNWYQQKPGKAPKL | | gtgtcgagctagccaggatatctcaaactacctgaattggtatcagcagaaacctggcaaagccc | |
| | | LIYYTSKLHSGVPSRFSGSGSGT | | ctaagctgctgatctactacactagtaagctgcatagcggagttccctctaggttctccggaagc | |
| | | DYTLTISSLQPEDFATYYCQQSS | | ggttcagggacagactataccctgaccattagctccttgcaaccagaggactttgctacctacta | |
| | | TLPFTFGQGTKLEIKRTVAAPSV | | ttgccagcagtctagtactcttccctttacctttggccagggtactaagctggagatcaaacgga | |
| | | FIFPPSDEQLKSGTASVVCLLNN | | cggttgcagcaccatccgtctttatcttcccaccttctgacgagcagctcaagtccggtactgcc | |
| | | FYPREAKVQWKVDNALQSGNSQE | | tccgtagtgtgtctcctgaacaacttctatcccagagaagccaaggtgcagtggaaagtggacaa | |
| | | SVTEQDSKDSTYSLSSTLTLSKA | | tgctctgcagtctgggaacagtcaagagtctgtgactgaacaggattccaaggatagcacctact | |
| | | DYEKHKVYACEVTHQGLSSPVTK | | ccttgagttctacccttacactgtcaaaagccgactacgagaagcacaaggtgtatgcctgcgaa | |
| | | SFNRGEC | | gtcacacaccaagggttgtcatctcccgtgacaaagtccttcaatcgtggcgaatgc | |
| human- | Heavy | QVQLVQSGPEVKKPGASVKVVCK | 221 | caggtgcagttggtccagagtggaccagaggtgaagaagcctggggccagtgtgaaggtggtctg | 222 |
| ized | Chain | ASGYTFTSYYIQWVKQRPGQGLE | | caaggcatcaggatacacgtttaccagctattacatccagtgggtgaagcaacgtcctggtcagg | |
| HM242- | | WIGWIYPGDGTTKYNEKFKGRVT | | gacttgaatggattgggtggatttaccccggtgatggcactactaagtacaatgagaagttcaaa | |
| C3- | | MTIDKSTRTAYMELRSLRSDDTA | | ggacgagtcaccatgaccatcgataagtcaactcgcacagcctatatggagctgagaagtctgcg | |
| X4-KS | | VYYCASYYGSYFDYWGQGTLVTV | | ctctgacgatacagctgtgtattactgcgcctcctactatgggtcctacttcgactattggggcc | |
| | | SSASTKGPSVFPLAPSSKSTSGG | | agggcactctggtcaccgtgtctagtgcctccaccaaaggcccctctgtgtttccactggcacca | |
| | | TAALGCLVKDYFPEPVTVSWNSG | | agctcaaagtcaaccagtggtggaaccgctgctctgggctgtctggttaaggactatttccccga | |
| | | ALTSGVHTFPAVLQSSGLYSLSS | | acctgtaaccgtaagctggaatagtggcgcactgacctccggggtccacacatttcccgccgtgc | |
| | | VVTVPSSSLGTQTYICNVNHKPS | | tgcagagttcaggcctctattccctcagctccgtcgtgactgtcccctcctcttcccttggtact | |
| | | NTKVDKKVEPKSCDKTHTCPPCP | | cagacttacatctgcaacgtgaaccacaagccctccaacaccaaggtggacaagaaggtcgagcc | |
| | | APELLGGPDVFLFPPKPKQTLMI | | caagtcctgcgacaagacccacacctgccccccctgccccgcccccgagctgctgggcggccccg | |
| | | SRTPEVTCVVVDVGDEDPEVKFN | | acgtgttcctgttcccccccaagcccaaggacaccctgatgatctccaggacccccgaggtgacc | |
| | | WYVDGVEVHNAKTKPREEQYNST | | tgcgtggtggtggacgtgggcgacgaggaccccgaggtgaagttcaactggtacgtggacggcgt | |
| | | YRVVSVLTVLHQDWLNGKEYKCA | | ggaggtgcacaacgccaagaccaagcccagggaggagcagtacaactccacctacagggtggtgt | |
| | | VSNKAYPAPEEKTISKAKGQPRE | | ccgtgctgaccgtgctgcaccaggactggctgaacggcaaggagtacaagtgcgccgtgtccaac | |
| | | PQVYTLPPSRDELTKNQVSLTCL | | aaggccTACcccgcccccGAGgagaagaccatctccaaggccaagggccagcccagggagcccca | |
| | | VKGFYPSDIAVEWESNGQPENNY | | ggtgtacaccctgcccccctccagggacgagctgaccaagaaccaggtgtccctgacctgcctgg | |
| | | KTTPPVLDSDGSFFLYSKLTVDK | | tgaagggcttctacccctccgacatcgccgtggagtgggagtccaacggccagcccgagaacaac | |
| | | SRWQQGNVFSCSVMHEALHNHYT | | tacaagaccaccccccccgtgctggactccgacggctccttcttcctgtactccaagctgaccgt | |
| | | QKSLSLSPGK | | ggacaagtccaggtggcagcagggcaacgtgttctcctgctccgtgatgcacgaggccctgcaca | |
| | | | | accactacacccagaagtccctgtccctgtcccccggcaag | |
| | Light | DIQMTQSPSSLSASVGDRVTITQ | 223 | gacattcagatgacccaaagccctagtagcctttccgcttcagttggcgatagggtcaccattac | 224 |
| | Chain | RASQDISNYLNWYQQKPGKAPKL | | gtgtcgagctagccaggatatctcaaactacctgaattggtatcagcagaaacctggcaaagccc | |
| | | LIYYTSKLHSGVPSRFSGSGSGT | | ctaagctgctgatctactacactagtaagctgcatagcggagttccctctaggttctccggaagc | |
| | | DYTLTISSLQPEDFATYYCQQSS | | ggttcagggacagactataccctgaccattagctccttgcaaccagaggactttgctacctacta | |
| | | TLPFTFGQGTKLEIKRTVAAPSV | | ttgccagcagtctagtactcttccctttacctttggccagggtactaagctggagatcaaacgga | |
| | | FIFPPSDEQLKSGTASVVQLLNN | | cggttgcagcaccatccgtctttatcttcccaccttctgacgagcagctcaagtccggtactgcc | |
| | | FYPREAKVQWKVDNALQSGNSQE | | tccgtagtgtgtctcctgaacaacttctatcccagagaagccaaggtgcagtggaaagtggacaa | |
| | | SVTEQDSKDSTYSLSSTLTLSKA | | tgctctgcagtctgggaacagtcaagagtctgtgactgaacaggattccaaggatagcacctact | |
| | | DYEKHKVYACEVTHQGLSSPVTK | | ccttgagttctacccttacactgtcaaaagccgactacgagaagcacaaggtgtatgcctgcgaa | |
| | | SFNRGEC | | gtcacacaccaagggttgtcatctcccgtgacaaagtccttcaatcgtggcgaatgc | |
| human- | Heavy | QVQLVQSGPEVKKPGASVKVVCK | 225 | caggtgcagctggttcagagcggtcccgaggtgaagaaaccaggtgcttccgtgaaggtagtttg | 226 |
| ized | Chain | ASGYTFTSYYIQWVRQVPGQGLE | | caaagccagtggctatactttcacctcctattacatccaatgggtgagacaggtgcctggccaag | |
| HM242- | | WMGWIYPGDGTTKYNEKFKGRVT | | gtcttgagtggatggggtggatctatcccggcgatggtaccactaagtacaacgagaagttcaaa | |
| D3- | | MTIDTSTSTAYMELRSLRSDDTA | | gggagggttacgatgaccattgacacctcaactagcactgcttatatggaactgagatctctgcg | |
| X2-K | | VYYCASYYGSYFDYWGQGTLVTV | | atccgatgacacagcagtgtactactgcgcaagctactacggatcttactttgactattggggac | |
| | | SSASTKGPSVFPLAPSSKSTSGG | | aaggaactctggtcacagtgtctagtgcctcaaccaagggaccatccgtgttcccattggctccc | |
| | | TAALGQLVKDYFPEPVTVSWNSG | | agttccaaaagcaccagtggtggcaccgctgcccttggatgcctcgtaaaggactactttcctga | |
| | | ALTSGVHTFPAVLQSSGLYSLSS | | gcccgtgacggtatcctggaactccggagcacttacatctggggtgcacacctttcctgccgtcc | |
| | | VVTVPSSSLGTQTYICNVNHKPS | | tgcagtcatctggcctgtattctctgtcctctgtggtgacagtgcctagcagttctttgggaact | |
| | | NTKVDKKVEPKSCDKTHTCPPCP | | cagacctacatctgcaacgtgaaccacaagccctccaacaccaaggtggacaagaaggtcgagcc | |
| | | APELLDGPSVFLFPPKPKQTLMI | | caagtcctgcgacaagacccacacctgccccccctgccccgcccccgagctgctggacggcccct | |
| | | SRTPEVTCVVVDVSDEDPEVKFN | | ccgtgttcctgttcccccccaagcccaaggacaccctgatgatctccaggacccccgaggtgacc | |
| | | WYVDGVEVHNAKTKPREEQYNST | | tgcgtggtggtggacgtgtccgacgaggaccccgaggtgaagttcaactggtacgtggacggcgt | |
| | | YRVVSVLTVLHQDWLNGKEYKCA | | ggaggtgcacaacgccaagaccaagcccagggaggagcagtacaactccacctacagggtggtgt | |
| | | VSNKALPAPIEKTISKAKGQPRE | | ccgtgctgaccgtgctgcaccaggactggctgaacggcaaggagtacaagtgcgccgtgtccaac | |
| | | PQVYTLPPSRDELTKNQVSLTCL | | aaggccctgcccgcccccatcgagaagaccatctccaaggccaagggccagcccagggagcccca | |
| | | VKGFYPSDIAVEWESNGQPENNY | | ggtgtacaccctgcccccctccagggacgagctgaccaagaaccaggtgtccctgacctgcctgg | |
| | | KTTPPVLDSDGSFFLYSKLTVDK | | tgaagggcttctacccctccgacatcgccgtggagtgggagtccaacggccagcccgagaacaac | |
| | | SRWQQGNVFSCSVMHEALHNHYT | | tacaagaccaccccccccgtgctggactccgacggctccttcttcctgtactccaagctgaccgt | |
| | | QKSLSLSPGK | | ggacaagtccaggtggcagcagggcaacgtgttctcctgctccgtgatgcacgaggccctgcaca | |
| | | | | accactacacccagaagtccctgtccctgtcccccggcaag | |
| | Light | DIQMTQSPSSLSASVGDRVTITC | 227 | gacattcagatgacccaaagccctagtagcctttccgcttcagttggcgatagggtcaccattac | 228 |
| | Chain | RASQDISNYLNWYQQKPGKAPKL | | gtgtcgagctagccaggatatctcasactacctgaattggtatcagcagaaacctggcaaagccc | |
| | | LIYYTSKLHSGVPSRFSGSGSGT | | ctaagctgctgatctactacactagtaagctgcatagcggagttccctctaggttctccggaagc | |
| | | DYTLTISSLQPEDFATYYCQQSS | | ggttcagggacagactataccctgaccattagctccttgcaaccagaggactttgctacctacta | |
| | | TLPFTFGQGTKLEIKRTVAAPSV | | ttgccagcagtctagtactcttccctttacctttggccagggtactaagctggagatcaaacgga | |
| | | FIFPPSDEQLKSGTASVVCLLNN | | cggttgcagcaccatccgtctttatcttcccaccttctgacgagcagctcaagtccggtactgcc | |
| | | FYPREAKVQWKVDNALQSGNSQE | | tccgtagtgtgtctcctgaacaacttctatcccagagaagccaaggtgcagtggaaagtggacaa | |
| | | SVTEQDSKDSTYSLSSTLTLSKA | | tgctctgcagtctgggaacagtcaagagtctgtgactgaacaggattccaaggatagcacctact | |
| | | DYEKHKVYACEVTHQGLSSPVTK | | ccttgagttctacccttacactgtcaaaagccgactacgagaagcacaaggtgtatgcctgcgaa | |
| | | SFNRGEC | | gtcacacaccaagggttgtcatctcccgtgacaaagtccttcaatcgtggcgaatgc | |
| human- | Heavy | QVQLVQSGPEVKKPGASVKVVCK | 229 | caggtgcagctggttcagagcggtcccgaggtgaagaaaccaggtgcttccgtgaaggtagtttg | 230 |
| ized | Chain | ASGYTFTSYYIQWVRQVPGQGLE | | caaagccagtggctatactttcacctcctattacatccaatgggtgagacaggtgcctggccaag | |
| HM242- | | WMGWIYPGDGTTKYNEKFKGRVT | | gtcttgagtggatggggtggatctatcccggcgatggtaccactaagtacaacgagaagttcaaa | |
| D3- | | MTIDTSTSTAYMELRSLRSDDTA | | gggagggttacgatgaccattgacacctcaactagcactgcttatatggaactgagatctctgcg | |
| X3-K | | VYYCASYYGSYFDYWGQGTLVTV | | atccgatgacacagcagtgtactactgcgcaagctactacggatcttactttgactattggggac | |
| | | SSASTKGPSVFPLAPSSKSTSGG | | aaggaactctggtcacagtgtctagtgcctccaccaaaggcccctctgtgtttccactggcacca | |
| | | TAALGCLVKDYFPEPVTVSWNSG | | agctcaaagtcaaccagtggtggaaccgctgctctgggctgtctggttaaggactatttccccga | |
| | | ALTSGVHTFPAVLQSSGLYSLSS | | acctgtaaccgtaagctggaatagtggcgcactgacctccggggtccacacatttcccgccgtgc | |
| | | VVTVPSSSLGTQTYICNVNHKPS | | tgcagagttcaggcctctattccctcagctccgtcgtgactgtcccctcctcttcccttggtact | |
| | | NTKVDKKVEPKSCDKTHTCPPCP | | cagacttacatctgcaacgtgaaccacaagccctccaacaccaaggtggacaagaaggtcgagcc | |
| | | APELLGGPDVFLFPPKPKQTLMI | | caagtcctgcgacaagacccacacctgccccccctgccccgcccccgagctgctgggcggccccg | |
| | | SRTPEVTCVVVDVSDEDPEVKFN | | acgtgttcctgttcccccccaagcccaaggacaccctgatgatctccaggacccccgaggtgacc | |
| | | WYVDGVEVHNAKTKPREEQYNST | | tgcgtggtggtggacgtgagtgacgaggaccccgaggtgaagttcaactggtacgtggacggcgt | |
| | | YRVVSVLTVLHQDWLNGKEYKCA | | ggaggtgcacaacgccaagaccaagcccagggaggagcagtacaactccacctacagggtggtgt | |
| | | VSNKALPAPIEKTISKAKGQPRE | | ccgtgctgaccgtgctgcaccaggactggctgaacggcaaggagtacaagtgcgccgtgtccaac | |
| | | PQVYTLPPSRDELTKNQVSLTCL | | aaggccctgcccgcccccatcgagaagaccatctccaaggccaagggccagcccagggagcccca | |
| | | VKGFYPSDIAVEWESNGQPENNY | | ggtgtacaccctgcccccctccagggacgagctgaccaagaaccaggtgtccctgacctgcctgg | |
| | | KTTPPVLDSDGSFFLYSKLTVDK | | tgaagggcttctacccctccgacatcgccgtggagtgggagtccaacggccagcccgagaacaac | |
| | | SRWQQGNVFSCSVMHEALHNHYT | | tacaagaccaccccccccgtgctggactccgacggctccttcttcctgtactccaagctgaccgt | |
| | | QKSLSLSPGK | | ggacaagtccaggtggcagcagggcaacgtgttctcctgctccgtgatgcacgaggccctgcaca | |
| | | | | accactacacccagaagtccctgtccctgtcccccggcaag | |
| | Light | DIQMTQSPSSLSASVGDRVTITQ | 231 | gacattcagatgacccaaagccctagtagcctttccgcttcagttggcgatagggtcaccattac | 232 |
| | Chain | RASQDISNYLNWYQQKPGKAPKL | | gtgtcgagctagccaggatatctcaaactacctgaattggtatcagcagaaacctggcaaagccc | |
| | | LIYYTSKLHSGVPSRFSGSGSGT | | ctaagctgctgatctactacactagtaagctgcatagcggagttccctctaggttctccggaagc | |
| | | DYTLTISSLQPEDFATYYCQQSS | | ggttcagggacagactataccctgaccattagctccttgcaaccagaggactttgctacctacta | |
| | | TLPFTFGQGTKLEIKRTVAAPSV | | ttgccagcagtctagtactcttccctttacctttggccagggtactaagctggagatcaaacgga | |
| | | FIFPPSDEQLKSGTASVVCLLNN | | cggttgcagcaccatccgtctttatcttcccaccttctgacgagcagctcaagtccggtactgcc | |
| | | FYPREAKVQWKVDNALQSGNSQE | | tccgtagtgtgtctcctgaacaacttctatcccagagaagccaaggtgcagtggaaagtggacaa | |
| | | SVTEQDSKDSTYSLSSTLTLSKA | | tgctctgcagtctgggaacagtcaagagtctgtgactgaacaggattccaaggatagcacctact | |
| | | DYEKHKVYACEVTHQGLSSPVTK | | ccttgagttctacccttacactgtcaaaagccgactacgagaagcacaaggtgtatgcctgcgaa | |
| | | SFNRGEC | | gtcacacaccaagggttgtcatctcccgtgacaaagtccttcaatcgtggcgaatgc | |
| human- | Heavy | QVQLVQSGPEVKKPGASVKVVCK | 233 | caggtgcagctggttcagagcggtcccgaggtgaagaaaccaggtgcttccgtgaaggtagtttg | 234 |
| ized | Chain | ASGYTFTSYYIQWVRQVPGQGLE | | caaagccagtggctatactttcacctcctattacatccaatgggtgagacaggtgcctggccaag | |
| HM242- | | WMGWIYPGDGTTKYNEKFKGRVT | | gtcttgagtggatggggtggatctatcccggcgatggtaccactaagtacaacgagaagttcaaa | |
| D3- | | MTIDTSTSTAYMELRSLRSDDTA | | gggagggttacgatgaccattgacacctcaactagcactgcttatatggaactgagatctctgcg | |
| X3-KE | | VYYCASYYGSYFDYWGQGTLVTV | | atccgatgacacagcagtgtactactgcgcaagctactacggatcttactttgactattggggac | |
| | | SSASTKGPSVFPLAPSSKSTSGG | | aaggaactctggtcacagtgtctagtgcctccaccaaaggcccctctgtgtttccactggcacca | |
| | | TAALGQLVKDYFPEPVTVSWNSG | | agctcaaagtcaaccagtggtggaaccgctgctctgggctgtctggttaaggactatttccccga | |
| | | ALTSGVHTFPAVLQSSGLYSLSS | | acctgtaaccgtaagctggaatagtggcgcactgacctccggggtccacacatttcccgccgtgc | |
| | | VVTVPSSSLGTQTYICNVNHKPS | | tgcagagttcaggcctctattccctcagctccgtcgtgactgtcccctcctcttcccttggtact | |
| | | NTKVDKKVEPKSCDKTHTCPPCP | | cagacttacatctgcaacgtgaaccacaagccctccaacaccaaggtggacaagaaggtcgagcc | |
| | | APELLGGPDVFLFPPKPKDTLMI | | caagtcctgcgacaagacccacacctgccccccctgccccgcccccgagctgctgggcggccccg | |
| | | SRTPEVTCVVVDVSDEDPEVKFN | | acgtgttcctgttcccccccaagcccaaggacaccctgatgatctccaggacccccgaggtgacc | |
| | | WYVDGVEVHNAKTKPRAEQYNST | | tgcgtggtggtggacgtgagtgacgaggaccccgaggtgaagttcaactggtacgtggacggcgt | |
| | | YRVVSVLTVLHQDWLNGKEYKCA | | ggaggtgcacaacgccaagaccaagcccagggccgagcagtacaactccacctacagggtggtgt | |
| | | VSNKALPAPIEKTISKAKGQPRE | | ccgtgctgaccgtgctgcaccaggactggctgaacggcaaggagtacaagtgcgccgtgtccaac | |
| | | PQVYTLPPSRDELTKNQVSLTCL | | aaggccctgcccgcccccatcgagaagaccatctccaaggccaagggccagcccagggagcccca | |
| | | VKGFYPSDIAVEWESNGQPENNY | | ggtgtacaccctgcccccctccagggacgagctgaccaagaaccaggtgtccctgacctgcctgg | |
| | | KTTPPVLDSDGSFFLYSKLTVDK | | tgaagggcttctacccctccgacatcgccgtggagtgggagtccaacggccagcccgagaacaac | |
| | | SRWQQGNVFSCSVMHEALHNHYT | | tacaagaccaccccccccgtgctggactccgacggctccttcttcctgtactccaagctgaccgt | |
| | | QKSLSLSPGK | | ggacaagtccaggtggcagcagggcaacgtgttctcctgctccgtgatgcacgaggccctgcaca | |
| | | | | accactacacccagaagtccctgtccctgtcccccggcaag | |
| | Light | DIQMTQSPSSLSASVGDRVTITC | 235 | gacattcagatgacccaaagccctagtagcctttccgcttcagttggcgatagggtcaccattac | 236 |
| | Chain | RASQDISNYLNWYQQKPGKAPKL | | gtgtcgagctagccaggatatctcaaactacctgaattggtatcagcagaaacctggcaaagccc | |
| | | LIYYTSKLHSGVPSRFSGSGSGT | | ctaagctgctgatctactacactagtaagctgcatagcggagttccctctaggttctccggaagc | |
| | | DYTLTISSLQPEDFATYYCQQSS | | ggttcagggacagactataccctgaccattagctccttgcaaccagaggactttgctacctacta | |
| | | TLPFTFGQGTKLEIKRTVAAPSV | | ttgccagcagtctagtactcttccctttacctttggccagggtactaagctggagatcaaacgga | |
| | | FIFPPSDEQLKSGTASVVCLLNN | | cggttgcagcaccatccgtctttatcttcccaccttctgacgagcagctcaagtccggtactgcc | |
| | | FYPREAKVQWKVDNALQSGNSQE | | tccgtagtgtgtctcctgaacaacttctatcccagagaagccaaggtgcagtggaaagtggacaa | |
| | | SVTEQDSKDSTYSLSSTLTLSKA | | tgctctgcagtctgggaacagtcaagagtctgtgactgaacaggattccaaggatagcacctact | |
| | | DYEKHKVYACEVTHQGLSSPVTK | | ccttgagttctacccttacactgtcaaaagccgactacgagaagcacaaggtgtatgcctgcgaa | |
| | | SFNRGEC | | gtcacacaccaagggttgtcatctcccgtgacaaagtccttcaatcgtggcgaatgc | |
| human- | Heavy | QVQLVQSGPEVKKPGASVKVVCK | 237 | caggtgcagctggttcagagcggtcccgaggtgaagaaaccaggtgcttccgtgaaggtagtttg | 238 |
| ized | Chain | ASGYTFTSYYIQWVRQVPGQGLE | | caaagccagtggctatactttcacctcctattacatccaatgggtgagacaggtgcctggccaag | |
| HM242- | | WMGWIYPGDGTTKYNEKFKGRVT | | gtcttgagtggatggggtggatctatcccggcgatggtaccactaagtacaacgagaagttcaaa | |
| D3- | | MTIDTSTSTAYMELRSLRSDDTA | | gggagggttacgatgaccattgacacctcaactagcactgcttatatggaactgagatctctgcg | |
| X3-KI | | VYYCASYYGSYFDYWGQGTLVTV | | atccgatgacacagcagtgtactactgcgcaagctactacggatcttactttgactattggggac | |
| | | SSASTKGPSVFPLAPSSKSTSGG | | aaggaactctggtcacagtgtctagtgcctccaccaaaggcccctctgtgtttccactggcacca | |
| | | TAALGCLVKDYFPEPVTVSWNSG | | agctcaaagtcaaccagtggtggaaccgctgctctgggctgtctggttaaggactatttccccga | |
| | | ALTSGVHTFPAVLQSSGLYSLSS | | acctgtaaccgtaagctggaatagtggcgcactgacctccggggtccacacatttcccgccgtgc | |
| | | VVTVPSSSLGTQTYICNVNHKPS | | tgcagagttcaggcctctattccctcagctccgtcgtgactgtcccctcctcttcccttggtact | |
| | | NTKVDKKVEPKSCDKTHTCPPCP | | cagacttacatctgcaacgtgaaccacaagccctccaacaccaaggtggacaagaaggtcgagcc | |
| | | APELLGGPDVFLFPPKPKQTLMI | | caagtcctgcgacaagacccacacctgccccccctgccccgcccccgagctgctgggcggccccg | |
| | | SRTPEVTCVVVDVSDEDPEVKFN | | acgtgttcctgttcccccccaagcccaaggacaccctgatgatctccaggacccccgaggtgacc | |
| | | WYVDGVEVHNAKTKPREEQYNST | | tgcgtggtggtggacgtgTCCgacgaggaccccgaggtgaagttcaactggtacgtggacggcgt | |
| | | YRVVSVLTVLHQDWLNGKEYKCA | | ggaggtgcacaacgccaagaccaagcccagggaggagcagtacaactccacctacagggtggtgt | |
| | | VSNKALPAPEEKTISKAKGQPRE | | ccgtgctgaccgtgctgcaccaggactggctgaacggcaaggagtacaagtgcgccgtgtccaac | |
| | | PQVYTLPPSRDELTKNQVSLTCL | | aaggccctgcccgcccccGAGgagaagaccatctccaaggccaagggccagcccagggagcccca | |
| | | VKGFYPSDIAVEWESNGQPENNY | | ggtgtacaccctgcccccctccagggacgagctgaccaagaaccaggtgtccctgacctgcctgg | |
| | | KTTPPVLDSDGSFFLYSKLTVDK | | tgaagggcttctacccctccgacatcgccgtggagtgggagtccaacggccagcccgagaacaac | |
| | | SRWQQGNVFSCSVMHEALHNHYT | | tacaagaccaccccccccgtgctggactccgacggctccttcttcctgtactccaagctgaccgt | |
| | | QKSLSLSPGK | | ggacaagtccaggtggcagcagggcaacgtgttctcctgctccgtgatgcacgaggccctgcaca | |
| | | | | accactacacccagaagtccctgtccctgtcccccggcaag | |
| | Light | DIQMTQSPSSLSASVGDRVTITC | 239 | gacattcagatgacccaaagccctagtagcctttccgcttcagttggcgatagggtcaccattac | 240 |
| | Chain | RASQDISNYLNWYQQKPGKAPKL | | gtgtcgagctagccaggatatctcaaactacctgaattggtatcagcagaaacctggcaaagccc | |
| | | LIYYTSKLHSGVPSRFSGSGSGT | | ctaagctgctgatctactacactagtaagctgcatagcggagttccctctaggttctccggaagc | |
| | | DYTLTISSLQPEDFATYYCQQSS | | ggttcagggacagactataccctgaccattagctccttgcaaccagaggactttgctacctacta | |
| | | TLPFTFGQGTKLEIKRTVAAPSV | | ttgccagcagtctagtactcttccctttacctttggccagggtactaagctggagatcaaacgga | |
| | | FIFPPSDEQLKSGTASVVCLLNN | | cggttgcagcaccatccgtctttatcttcccaccttctgacgagcagctcaagtccggtactgcc | |
| | | FYPREAKVQWKVDNALQSGNSQE | | tccgtagtgtgtctcctgaacaacttctatcccagagaagccaaggtgcagtggaaagtggacaa | |
| | | SVTEQDSKDSTYSLSSTLTLSKA | | tgctctgcagtctgggaacagtcaagagtctgtgactgaacaggattccaaggatagcacctact | |
| | | DYEKHKVYACEVTHQGLSSPVTK | | ccttgagttctacccttacactgtcaaaagccgactacgagaagcacaaggtgtatgcctgcgaa | |
| | | SFNRGEC | | gtcacacaccaagggttgtcatctcccgtgacaaagtccttcaatcgtggcgaatgc | |
| human- | Heavy | QVQLVQSGPEVKKPGASVKVVCK | 241 | caggtgcagctggttcagagcggtcccgaggtgaagaaaccaggtgcttccgtgaaggtagtttg | 242 |
| ized | Chain | ASGYTFTSYYIQWVRQVPGQGLE | | caaagccagtggctatactttcacctcctattacatccaatgggtgagacaggtgcctggccaag | |
| HM242- | | WMGWIYPGDGTTKYNEKFKGRVT | | gtcttgagtggatggggtggatctatcccggcgatggtaccactaagtacaacgagaagttcaaa | |
| D3- | | MTIDTSTSTAYMELRSLRSDDTA | | gggagggttacgatgaccattgacacctcaactagcactgcttatatggaactgagatctctgcg | |
| X3-KL | | VYYCASYYGSYFDYWGQGTLVTV | | atccgatgacacagcagtgtactactgcgcaagctactacggatcttactttgactattggggac | |
| | | SSASTKGPSVFPLAPSSKSTSGG | | aaggaactctggtcacagtgtctagtgcctccaccaaaggcccctctgtgtttccactggcacca | |
| | | TAALGQLVKDYFPEPVTVSWNSG | | agctcaaagtcaaccagtggtggaaccgctgctctgggctgtctggttaaggactatttccccga | |
| | | ALTSGVHTFPAVLQSSGLYSLSS | | acctgtaaccgtaagctggaatagtggcgcactgacctccggggtccacacatttcccgccgtgc | |
| | | VVTVPSSSLGTQTYICNVNHKPS | | tgcagagttcaggcctctattccctcagctccgtcgtgactgtcccctcctcttcccttggtact | |
| | | NTKVDKKVEPKSCDKTHTCPPCP | | cagacttacatctgcaacgtgaaccacaagccctccaacaccaaggtggacaagaaggtcgagcc | |
| | | APELLGGPDVFLFPPKPKQTLMI | | caagtcctgcgacaagacccacacctgccccccctgccccgcccccgagctgctgggcggccccg | |
| | | SRTPEVTCVVVDVSDEDPEVKFN | | acgtgttcctgttcccccccaagcccaaggacaccctgatgatctccaggacccccgaggtgacc | |
| | | WYVDGVEVHNAKTKPREEQYNST | | tgcgtggtggtggacgtgTCCgacgaggaccccgaggtgaagttcaactggtacgtggacggcgt | |
| | | YRVVSVLTVLHQDWLNGKEYKCA | | ggaggtgcacaacgccaagaccaagcccagggaggagcagtacaactccacctacagggtggtgt | |
| | | VSNKAYPAPIEKTISKAKGQPRE | | ccgtgctgaccgtgctgcaccaggactggctgaacggcaaggagtacaagtgcgccgtgtccaac | |
| | | PQVYTLPPSRDELTKNQVSLTCL | | aaggccTACcccgcccccatcgagaagaccatctccaaggccaagggccagcccagggagcccca | |
| | | VKGFYPSDIAVEWESNGQPENNY | | ggtgtacaccctgcccccctccagggacgagctgaccaagaaccaggtgtccctgacctgcctgg | |
| | | KTTPPVLDSDGSFFLYSKLTVDK | | tgaagggcttctacccctccgacatcgccgtggagtgggagtccaacggccagcccgagaacaac | |
| | | SRWQQGNVFSCSVMHEALHNHYT | | tacaagaccaccccccccgtgctggactccgacggctccttcttcctgtactccaagctgaccgt | |
| | | QKSLSLSPGK | | ggacaagtccaggtggcagcagggcaacgtgttctcctgctccgtgatgcacgaggccctgcaca | |
| | | | | accactacacccagaagtccctgtccctgtcccccggcaag | |
| | Light | DIQMTQSPSSLSASVGDRVTITC | 243 | gacattcagatgacccaaagccctagtagcctttccgcttcagttggcgatagggtcaccattac | 244 |
| | Chain | RASQDISNYLNWYQQKPGKAPKL | | gtgtcgagctagccaggatatctcaaactacctgaattggtatcagcagaaacctggcaaagccc | |
| | | LIYYTSKLHSGVPSRFSGSGSGT | | ctaagctgctgatctactacactagtaagctgcatagcggagttccctctaggttctccggaagc | |
| | | DYTLTISSLQPEDFATYYCQQSS | | ggttcagggacagactataccctgaccattagctccttgcaaccagaggactttgctacctacta | |
| | | TLPFTFGQGTKLEIKRTVAAPSV | | ttgccagcagtctagtactcttccctttacctttggccagggtactaagctggagatcaaacgga | |
| | | FIFPPSDEQLKSGTASVVCLLNN | | cggttgcagcaccatccgtctttatcttcccaccttctgacgagcagctcaagtccggtactgcc | |
| | | FYPREAKVQWKVDNALQSGNSQE | | tccgtagtgtgtctcctgaacaacttctatcccagagaagccaaggtgcagtggaaagtggacaa | |
| | | SVTEQDSKDSTYSLSSTLTLSKA | | tgctctgcagtctgggaacagtcaagagtctgtgactgaacaggattccaaggatagcacctact | |
| | | DYEKHKVYACEVTHQGLSSPVTK | | ccttgagttctacccttacactgtcaaaagccgactacgagaagcacaaggtgtatgcctgcgaa | |
| | | SFNRGEC | | gtcacacaccaagggttgtcatctcccgtgacaaagtccttcaatcgtggcgaatgc | |
| human- | Heavy | QVQLVQSGPEVKKPGASVKVVCK | 245 | caggtgcagctggttcagagcggtcccgaggtgaagaaaccaggtgcttccgtgaaggtagtttg | 246 |
| ized | Chain | ASGYTFTSYYIQWVRQVPGQGLE | | caaagccagtggctatactttcacctcctattacatccaatgggtgagacaggtgcctggccaag | |
| HM242- | | WMGWIYPGDGTTKYNEKFKGRVT | | gtcttgagtggatggggtggatctatcccggcgatggtaccactaagtacaacgagaagttcaaa | |
| D3- | | MTIDTSTSTAYMELRSLRSDDTA | | gggagggttacgatgaccattgacacctcaactagcactgcttatatggaactgagatctctgcg | |
| X3-KS | | VYYCASYYGSYFDYWGQGTLVTV | | atccgatgacacagcagtgtactactgcgcaagctactacggatcttactttgactattggggac | |
| | | SSASTKGPSVFPLAPSSKSTSGG | | aaggaactctggtcacagtgtctagtgcctcaaccaagggaccatccgtgttcccattggctccc | |
| | | TAALGCLVKDYFPEPVTVSWNSG | | agttccaaaagcaccagtggtggcaccgctgcccttggatgcctcgtaaaggactactttcctga | |
| | | ALTSGVHTFPAVLQSSGLYSLSS | | gcccgtgacggtatcctggaactccggagcacttacatctggggtgcacacctttcctgccgtcc | |
| | | VVTVPSSSLGTQTYICNVNHKPS | | tgcagtcatctggcctgtattctctgtcctctgtggtgacagtgcctagcagttctttgggaact | |
| | | NTKVDKKVEPKSCDKTHTCPPCP | | cagacctacatctgcaacgtgaaccacaagccctccaacaccaaggtggacaagaaggtcgagcc | |
| | | APELLGGPDVFLFPPKPKQTLMI | | caagtcctgcgacaagacccacacctgccccccctgccccgcccccgagctgctgggcggccccg | |
| | | SRTPEVTCVVVDVGDEDPEVKFN | | acgtgttcctgttcccccccaagcccaaggacaccctgatgatctccaggacccccgaggtgacc | |
| | | WYVDGVEVHNAKTKPREEQYNST | | tgcgtggtggtggacgtgggcgacgaggaccccgaggtgaagttcaactggtacgtggacggcgt | |
| | | YRVVSVLTVLHQDWLNGKEYKCA | | ggaggtgcacaacgccaagaccaagcccagggaggagcagtacaactccacctacagggtggtgt | |
| | | VSNKALPAPIEKTISKAKGQPRE | | ccgtgctgaccgtgctgcaccaggactggctgaacggcaaggagtacaagtgcgccgtgtccaac | |
| | | PQVYTLPPSRDELTKNQVSLTCL | | aaggccctgcccgcccccatcgagaagaccatctccaaggccaagggccagcccagggagcccca | |
| | | VKGFYPSDIAVEWESNGQPENNY | | ggtgtacaccctgcccccctccagggacgagctgaccaagaaccaggtgtccctgacctgcctgg | |
| | | KTTPPVLDSDGSFFLYSKLTVDK | | tgaagggcttctacccctccgacatcgccgtggagtgggagtccaacggccagcccgagaacaac | |
| | | SRWQQGNVFSCSVMHEALHNHYT | | tacaagaccaccccccccgtgctggactccgacggctccttcttcctgtactccaagctgaccgt | |
| | | QKSLSLSPGK | | ggacaagtccaggtggcagcagggcaacgtgttctcctgctccgtgatgcacgaggccctgcaca | |
| | | | | accactacacccagaagtccctgtccctgtcccccggcaag | |
| | Light | DIQMTQSPSSLSASVGDRVTITQ | 247 | gacattcagatgacccaaagccctagtagcctttccgcttcagttggcgatagggtcaccattac | 248 |
| | Chain | RASQDISNYLNWYQQKPGKAPKL | | gtgtcgagctagccaggatatctcaaactacctgaattggtatcagcagaaacctggcaaagccc | |
| | | LIYYTSKLHSGVPSRFSGSGSGT | | ctaagctgctgatctactacactagtaagctgcatagcggagttccctctaggttctccggaagc | |
| | | DYTLTISSLQPEDFATYYCQQSS | | ggttcagggacagactataccctgaccattagctccttgcaaccagaggactttgctacctacta | |
| | | TLPFTFGQGTKLEIKRTVAAPSV | | ttgccagcagtctagtactcttccctttacctttggccagggtactaagctggagatcaaacgga | |
| | | FIFPPSDEQLKSGTASVVCLLNN | | cggttgcagcaccatccgtctttatcttcccaccttctgacgagcagctcaagtccggtactgcc | |
| | | FYPREAKVQWKVDNALQSGNSQE | | tccgtagtgtgtctcctgaacaacttctatcccagagaagccaaggtgcagtggaaagtggacaa | |
| | | SVTEQDSKDSTYSLSSTLTLSKA | | tgctctgcagtctgggaacagtcaagagtctgtgactgaacaggattccaaggatagcacctact | |
| | | DYEKHKVYACEVTHQGLSSPVTK | | ccttgagttctacccttacactgtcaaaagccgactacgagaagcacaaggtgtatgcctgcgaa | |
| | | SFNRGEC | | gtcacacaccaagggttgtcatctcccgtgacaaagtccttcaatcgtggcgaatgc | |
| human- | Heavy | QVQLVQSGPEVKKPGASVKVVCK | 249 | caggtgcagctggttcagagcggtcccgaggtgaagaaaccaggtgcttccgtgaaggtagtttg | 250 |
| ized | Chain | ASGYTFTSYYIQWVRQVPGQGLE | | caaagccagtggctatactttcacctcctattacatccaatgggtgagacaggtgcctggccaag | |
| HM242- | | WMGWIYPGDGTTKYNEKFKGRVT | | gtcttgagtggatggggtggatctatcccggcgatggtaccactaagtacaacgagaagttcaaa | |
| D3-X3- | | MTIDTSTSTAYMELRSLRSDDTA | | gggagggttacgatgaccattgacacctcaactagcactgcttatatggaactgagatctctgcg | |
| KSI | | VYYCASYYGSYFDYWGQGTLVTV | | atccgatgacacagcagtgtactactgcgcaagctactacggatcttactttgactattggggac | |
| | | SSASTKGPSVFPLAPSSKSTSGG | | aaggaactctggtcacagtgtctagtgcctccaccaaaggcccctctgtgtttccactggcacca | |
| | | TAALGQLVKDYFPEPVTVSWNSG | | agctcaaagtcaaccagtggtggaaccgctgctctgggctgtctggttaaggactatttccccga | |
| | | ALTSGVHTFPAVLQSSGLYSLSS | | acctgtaaccgtaagctggaatagtggcgcactgacctccggggtccacacatttcccgccgtgc | |
| | | VVTVPSSSLGTQTYICNVNHKPS | | tgcagagttcaggcctctattccctcagctccgtcgtgactgtcccctcctcttcccttggtact | |
| | | NTKVDKKVEPKSCDKTHTCPPCP | | cagacttacatctgcaacgtgaaccacaagccctccaacaccaaggtggacaagaaggtcgagcc | |
| | | APELLGGPDVFLFPPKPKDTLMI | | caagtcctgcgacaagacccacacctgccccccctgccccgcccccgagctgctgggcggccccg | |
| | | SRTPEVTCVVVDVGDEDPEVKFN | | acgtgttcctgttcccccccaagcccaaggacaccctgatgatctccaggacccccgaggtgacc | |
| | | WYVDGVEVHNAKTKPREEQYNST | | tgcgtggtggtggacgtgGGCgacgaggaccccgaggtgaagttcaactggtacgtggacggcgt | |
| | | YRVVSVLTVLHQDWLNGKEYKCA | | ggaggtgcacaacgccaagaccaagcccagggaggagcagtacaactccacctacagggtggtgt | |
| | | VSNKALPAPEEKTISKAKGQPRE | | ccgtgctgaccgtgctgcaccaggactggctgaacggcaaggagtacaagtgcgccgtgtccaac | |
| | | PQVYTLPPSRDELTKNQVSLTCL | | aaggccctgcccgcccccGAGgagaagaccatctccaaggccaagggccagcccagggagcccca | |
| | | VKGFYPSDIAVEWESNGQPENNY | | ggtgtacaccctgcccccctccagggacgagctgaccaagaaccaggtgtccctgacctgcctgg | |
| | | KTTPPVLDSDGSFFLYSKLTVDK | | tgaagggcttctacccctccgacatcgccgtggagtgggagtccaacggccagcccgagaacaac | |
| | | SRWQQGNVFSCSVMHEALHNHYT | | tacaagaccaccccccccgtgctggactccgacggctccttcttcctgtactccaagctgaccgt | |
| | | QKSLSLSPGK | | ggacaagtccaggtggcagcagggcaacgtgttctcctgctccgtgatgcacgaggccctgcaca | |
| | | | | accactacacccagaagtccctgtccctgtcccccggcaag | |
| | Light | DIQMTQSPSSLSASVGDRVTITC | 251 | gacattcagatgacccaaagccctagtagcctttccgcttcagttggcgatagggtcaccattac | 252 |
| | Chain | RASQDISNYLNWYQQKPGKAPKL | | gtgtcgagctagccaggatatctcaaactacctgaattggtatcagcagaaacctggcaaagccc | |
| | | LIYYTSKLHSGVPSRFSGSGSGT | | ctaagctgctgatctactacactagtaagctgcatagcggagttccctctaggttctccggaagc | |
| | | DYTLTISSLQPEDFATYYCQQSS | | ggttcagggacagactataccctgaccattagctccttgcaaccagaggactttgctacctacta | |
| | | TLPFTFGQGTKLEIKRTVAAPSV | | ttgccagcagtctagtactcttccctttacctttggccagggtactaagctggagatcaaacgga | |
| | | FIFPPSDEQLKSGTASVVCLLNN | | cggttgcagcaccatccgtctttatcttcccaccttctgacgagcagctcaagtccggtactgcc | |
| | | FYPREAKVQWKVDNALQSGNSQE | | tccgtagtgtgtctcctgaacaacttctatcccagagaagccaaggtgcagtggaaagtggacaa | |
| | | SVTEQDSKDSTYSLSSTLTLSKA | | tgctctgcagtctgggaacagtcaagagtctgtgactgaacaggattccaaggatagcacctact | |
| | | DYEKHKVYACEVTHQGLSSPVTK | | ccttgagttctacccttacactgtcaaaagccgactacgagaagcacaaggtgtatgcctgcgaa | |
| | | SFNRGEC | | gtcacacaccaagggttgtcatctcccgtgacaaagtccttcaatcgtggcgaatgc | |
| human- | Heavy | QVQLVQSGPEVKKPGASVKVVCK | 253 | caggtgcagctggttcagagcggtcccgaggtgaagaaaccaggtgcttccgtgaaggtagtttg | 254 |
| ized | Chain | ASGYTFTSYYIQWVRQVPGQGLE | | caaagccagtggctatactttcacctcctattacatccaatgggtgagacaggtgcctggccaag | |
| HM242- | | WMGWIYPGDGTTKYNEKFKGRVT | | gtcttgagtggatggggtggatctatcccggcgatggtaccactaagtacaacgagaagttcaaa | |
| D3-X3- | | MTIDTSTSTAYMELRSLRSDDTA | | gggagggttacgatgaccattgacacctcaactagcactgcttatatggaactgagatctctgcg | |
| KSL | | VYYCASYYGSYFDYWGQGTLVTV | | atccgatgacacagcagtgtactactgcgcaagctactacggatcttactttgactattggggac | |
| | | SSASTKGPSVFPLAPSSKSTSGG | | aaggaactctggtcacagtgtctagtgcctccaccaaaggcccctctgtgtttccactggcacca | |
| | | TAALGCLVKDYFPEPVTVSWNSG | | agctcaaagtcaaccagtggtggaaccgctgctctgggctgtctggttaaggactatttccccga | |
| | | ALTSGVHTFPAVLQSSGLYSLSS | | acctgtaaccgtaagctggaatagtggcgcactgacctccggggtccacacatttcccgccgtgc | |
| | | VVTVPSSSLGTQTYICNVNHKPS | | tgcagagttcaggcctctattccctcagctccgtcgtgactgtcccctcctcttcccttggtact | |
| | | NTKVDKKVEPKSCDKTHTCPPCP | | cagacttacatctgcaacgtgaaccacaagccctccaacaccaaggtggacaagaaggtcgagcc | |
| | | APELLGGPDVFLFPPKPKQTLMI | | caagtcctgcgacaagacccacacctgccccccctgccccgcccccgagctgctgggcggccccg | |
| | | SRTPEVTCVVVDVGDEDPEVKFN | | acgtgttcctgttcccccccaagcccaaggacaccctgatgatctccaggacccccgaggtgacc | |
| | | WYVDGVEVHNAKTKPREEQYNST | | tgcgtggtggtggacgtgGGCgacgaggaccccgaggtgaagttcaactggtacgtggacggcgt | |
| | | YRVVSVLTVLHQDWLNGKEYKCA | | ggaggtgcacaacgccaagaccaagcccagggaggagcagtacaactccacctacagggtggtgt | |
| | | VSNKAYPAPIEKTISKAKGQPRE | | ccgtgctgaccgtgctgcaccaggactggctgaacggcaaggagtacaagtgcgccgtgtccaac | |
| | | PQVYTLPPSRDELTKNQVSLTCL | | aaggccTACcccgcccccatcgagaagaccatctccaaggccaagggccagcccagggagcccca | |
| | | VKGFYPSDIAVEWESNGQPENNY | | ggtgtacaccctgcccccctccagggacgagctgaccaagaaccaggtgtccctgacctgcctgg | |
| | | KTTPPVLDSDGSFFLYSKLTVDK | | tgaagggcttctacccctccgacatcgccgtggagtgggagtccaacggccagcccgagaacaac | |
| | | SRWQQGNVFSCSVMHEALHNHYT | | tacaagaccaccccccccgtgctggactccgacggctccttcttcctgtactccaagctgaccgt | |
| | | QKSLSLSPGK | | ggacaagtccaggtggcagcagggcaacgtgttctcctgctccgtgatgcacgaggccctgcaca | |
| | | | | accactacacccagaagtccctgtccctgtcccccggcaag | |
| | Light | DIQMTQSPSSLSASVGDRVTITC | 255 | gacattcagatgacccaaagccctagtagcctttccgcttcagttggcgatagggtcaccattac | 256 |
| | Chain | RASQDISNYLNWYQQKPGKAPKL | | gtgtcgagctagccaggatatctcaaactacctgaattggtatcagcagaaacctggcaaagccc | |
| | | LIYYTSKLHSGVPSRFSGSGSGT | | ctaagctgctgatctactacactagtaagctgcatagcggagttccctctaggttctccggaagc | |
| | | DYTLTISSLQPEDFATYYCQQSS | | ggttcagggacagactataccctgaccattagctccttgcaaccagaggactttgctacctacta | |
| | | TLPFTFGQGTKLEIKRTVAAPSV | | ttgccagcagtctagtactcttccctttacctttggccagggtactaagctggagatcaaacgga | |
| | | FIFPPSDEQLKSGTASVVCLLNN | | cggttgcagcaccatccgtctttatcttcccaccttctgacgagcagctcaagtccggtactgcc | |
| | | FYPREAKVQWKVDNALQSGNSQE | | tccgtagtgtgtctcctgaacaacttctatcccagagaagccaaggtgcagtggaaagtggacaa | |
| | | SVTEQDSKDSTYSLSSTLTLSKA | | tgctctgcagtctgggaacagtcaagagtctgtgactgaacaggattccaaggatagcacctact | |
| | | DYEKHKVYACEVTHQGLSSPVTK | | ccttgagttctacccttacactgtcaaaagccgactacgagaagcacaaggtgtatgcctgcgaa | |
| | | SFNRGEC | | gtcacacaccaagggttgtcatctcccgtgacaaagtccttcaatgtggcgaatgc | |
| human- | Heavy | QVQLVQSGPEVKKPGASVKVVCK | 257 | caggtgcagctggttcagagcggtcccgaggtgaagaaaccaggtgcttccgtgaaggtagtttg | 258 |
| ized | Chain | ASGYTFTSYYIQWVRQVPGQGLE | | caaagccagtggctatactttcacctcctattacatccaatgggtgagacaggtgcctggccaag | |
| HM242- | | WMGWIYPGDGTTKYNEKFKGRVT | | gtcttgagtggatggggtggatctatcccggcgatggtaccactaagtacaacgagaagttcaaa | |
| D3- | | MTIDTSTSTAYMELRSLRSDDTA | | gggagggttacgatgaccattgacacctcaactagcactgcttatatggaactgagatctctgcg | |
| X4-K | | VYYCASYYGSYFDYWGQGTLVTV | | atccgatgacacagcagtgtactactgcgcaagctactacggatcttactttgactattggggac | |
| | | SSASTKGPSVFPLAPSSKSTSGG | | aaggaactctggtcacagtgtctagtgcctcaaccaagggaccatccgtgttcccattggctccc | |
| | | TAALGQLVKDYFPEPVTVSWNSG | | agttccaaaagcaccagtggtggcaccgctgcccttggatgcctcgtaaaggactactttcctga | |
| | | ALTSGVHTFPAVLQSSGLYSLSS | | gcccgtgacggtatcctggaactccggagcacttacatctggggtgcacacctttcctgccgtcc | |
| | | VVTVPSSSLGTQTYICNVNHKPS | | tgcagtcatctggcctgtattctctgtcctctgtggtgacagtgcctagcagttctttgggaact | |
| | | NTKVDKKVEPKSCDKTHTCPPCP | | cagacctacatctgcaacgtgaaccacaagccctccaacaccaaggtggacaagaaggtcgagcc | |
| | | APELLGGPDVFLFPPKPKDTLMI | | caagtcctgcgacaagacccacacctgccccccctgccccgcccccgagctgctgggcggccccg | |
| | | SRTPEVTCVVVDVSDEDPEVKFN | | acgtgttcctgttcccccccaagcccaaggacaccctgatgatctccaggacccccgaggtgacc | |
| | | WYVDGVEVHNAKTKPREEQYNST | | tgcgtggtggtggacgtgtccgacgaggaccccgaggtgaagttcaactggtacgtggacggcgt | |
| | | YRVVSVLTVLHQDWLNGKEYKCA | | ggaggtgcacaacgccaagaccaagcccagggaggagcagtacaactccacctacagggtggtgt | |
| | | VSNKAYPAPEEKTISKAKGQPRE | | ccgtgctgaccgtgctgcaccaggactggctgaacggcaaggagtacaagtgcgccgtgtccaac | |
| | | PQVYTLPPSRDELTKNQVSLTCL | | aaggcctaccccgcccccgaggagaagaccatctccaaggccaagggccagcccagggagcccca | |
| | | VKGFYPSDIAVEWESNGQPENNY | | ggtgtacaccctgcccccctccagggacgagctgaccaagaaccaggtgtccctgacctgcctgg | |
| | | KTTPPVLDSDGSFFLYSKLTVDK | | tgaagggcttctacccctccgacatcgccgtggagtgggagtccaacggccagcccgagaacaac | |
| | | SRWQQGNVFSCSVMHEALHNHYT | | tacaagaccaccccccccgtgctggactccgacggctccttcttcctgtactccaagctgaccgt | |
| | | QKSLSLSPGK | | ggacaagtccaggtggcagcagggcaacgtgttctcctgctccgtgatgcacgaggccctgcaca | |
| | | | | accactacacccagaagtccctgtccctgtcccccggcaag | |
| | Light | DIQMTQSPSSLSASVGDRVTITC | 259 | gacattcagatgacccaaagccctagtagcctttccgcttcagttggcgatagggtcaccattac | 260 |
| | Chain | RASQDISNYLNWYQQKPGKAPKL | | gtgtcgagctagccaggatatctcaaactacctgaattggtatcagcagaaacctggcaaagccc | |
| | | LIYYTSKLHSGVPSRFSGSGSGT | | ctaagctgctgatctactacactagtaagctgcatagcggagttccctctaggttctccggaagc | |
| | | DYTLTISSLQPEDFATYYCQQSS | | ggttcagggacagactataccctgaccattagctccttgcaaccagaggactttgctacctacta | |
| | | TLPFTFGQGTKLEIKRTVAAPSV | | ttgccagcagtctagtactcttccctttacctttggccagggtactaagctggagatcaaacgga | |
| | | FIFPPSDEQLKSGTASVVQLLNN | | cggttgcagcaccatccgtctttatcttcccaccttctgacgagcagctcaagtccggtactgcc | |
| | | FYPREAKVQWKVDNALQSGNSQE | | tccgtagtgtgtctcctgaacaacttctatcccagagaagccaaggtgcagtggaaagtggacaa | |
| | | SVTEQDSKDSTYSLSSTLTLSKA | | tgctctgcagtctgggaacagtcaagagtctgtgactgaacaggattccaaggatagcacctact | |
| | | DYEKHKVYACEVTHQGLSSPVTK | | ccttgagttctacccttacactgtcaaaagccgactacgagaagcacaaggtgtatgcctgcgaa | |
| | | SFNRGEC | | gtcacacaccaagggttgtcatctcccgtgacaaagtccttcaatcgtggcgaatgc | |
| human- | Heavy | QVQLVQSGPEVKKPGASVKVVCK | 261 | caggtgcagctggttcagagcggtcccgaggtgaagaaaccaggtgcttccgtgaaggtagtttg | 262 |
| ized | Chain | ASGYTFTSYYIQWVRQVPGQGLE | | caaagccagtggctatactttcacctcctattacatccaatgggtgagacaggtgcctggccaag | |
| HM242- | | WMGWIYPGDGTTKYNEKFKGRVT | | gtcttgagtggatggggtggatctatcccggcgatggtaccactaagtacaacgagaagttcaaa | |
| D3- | | MTIDTSTSTAYMELRSLRSDDTA | | gggagggttacgatgaccattgacacctcaactagcactgcttatatggaactgagatctctgcg | |
| X4-KS | | VYYCASYYGSYFDYWGQGTLVTV | | atccgatgacacagcagtgtactactgcgcaagctactacggatcttactttgactattggggac | |
| | | SSASTKGPSVFPLAPSSKSTSGG | | aaggaactctggtcacagtgtctagtgcctccaccaaaggcccctctgtgtttccactggcacca | |
| | | TAALGCLVKDYFPEPVTVSWNSG | | agctcaaagtcaaccagtggtggaaccgctgctctgggctgtctggttaaggactatttccccga | |
| | | ALTSGVHTFPAVLQSSGLYSLSS | | acctgtaaccgtaagctggaatagtggcgcactgacctccggggtccacacatttcccgccgtgc | |
| | | VVTVPSSSLGTQTYICNVNHKPS | | tgcagagttcaggcctctattccctcagctccgtcgtgactgtcccctcctcttcccttggtact | |
| | | NTKVDKKVEPKSCDKTHTCPPCP | | cagacttacatctgcaacgtgaaccacaagccctccaacaccaaggtggacaagaaggtcgagcc | |
| | | APELLGGPDVFLFPPKPKQTLMI | | caagtcctgcgacaagacccacacctgccccccctgccccgcccccgagctgctgggcggccccg | |
| | | SRTPEVTCVVVDVGDEDPEVKFN | | acgtgttcctgttcccccccaagcccaaggacaccctgatgatctccaggacccccgaggtgacc | |
| | | WYVDGVEVHNAKTKPREEQYNST | | tgcgtggtggtggacgtgggcgacgaggaccccgaggtgaagttcaactggtacgtggacggcgt | |
| | | YRVVSVLTVLHQDWLNGKEYKCA | | ggaggtgcacaacgccaagaccaagcccagggaggagcagtacaactccacctacagggtggtgt | |
| | | VSNKAYPAPEEKTISKAKGQPRE | | ccgtgctgaccgtgctgcaccaggactggctgaacggcaaggagtacaagtgcgccgtgtccaac | |
| | | PQVYTLPPSRDELTKNQVSLTCL | | aaggccTACcccgcccccGAGgagaagaccatctccaaggccaagggccagcccagggagcccca | |
| | | VKGFYPSDIAVEWESNGQPENNY | | ggtgtacaccctgcccccctccagggacgagctgaccaagaaccaggtgtccctgacctgcctgg | |
| | | KTTPPVLDSDGSFFLYSKLTVDK | | tgaagggcttctacccctccgacatcgccgtggagtgggagtccaacggccagcccgagaacaac | |
| | | SRWQQGNVFSCSVMHEALHNHYT | | tacaagaccaccccccccgtgctggactccgacggctccttcttcctgtactccaagctgaccgt | |
| | | QKSLSLSPGK | | ggacaagtccaggtggcagcagggcaacgtgttctcctgctccgtgatgcacgaggccctgcaca | |
| | | | | accactacacccagaagtccctgtccctgtcccccggcaag | |
| | Light | DIQMTQSPSSLSASVGDRVTITC | 263 | gacattcagatgacccaaagccctagtagcctttccgcttcagttggcgatagggtcaccattac | 264 |
| | Chain | RASQDISNYLNWYQQKPGKAPKL | | gtgtcgagctagccaggatatctcaaactacctgaattggtatcagcagaaacctggcaaagccc | |
| | | LIYYTSKLHSGVPSRFSGSGSGT | | ctaagctgctgatctactacactagtaagctgcatagcggagttccctctaggttctccggaagc | |
| | | DYTLTISSLQPEDFATYYCQQSS | | ggttcagggacagactataccctgaccattagctccttgcaaccagaggactttgctacctacta | |
| | | TLPFTFGQGTKLEIKRTVAAPSV | | ttgccagcagtctagtactcttccctttacctttggccagggtactaagctggagatcaaacgga | |
| | | FIFPPSDEQLKSGTASVVQLLNN | | cggttgcagcaccatccgtctttatcttcccaccttctgacgagcagctcaagtccggtactgcc | |
| | | FYPREAKVQWKVDNALQSGNSQE | | tccgtagtgtgtctcctgaacaacttctatcccagagaagccaaggtgcagtggaaagtggacaa | |
| | | SVTEQDSKDSTYSLSSTLTLSKA | | tgctctgcagtctgggaacagtcaagagtctgtgactgaacaggattccaaggatagcacctact | |
| | | DYEKHKVYACEVTHQGLSSPVTK | | ccttgagttctacccttacactgtcaaaagccgactacgagaagcacaaggtgtatgcctgcgaa | |
| | | SFNRGEC | | gtcacacaccaagggttgtcatctcccgtgacaaagtccttcaatcgtggcgaatgc | |
| human- | Heavy | QVQLVQSGPEVKKPGASVKVVCK | 265 | caggtgcagctggttcagtccgggcctgaggtgaagaagcccggcgctagtgtgaaggtcgtctg | 266 |
| ized | Chain | TSGYTFTSYYIQWLKQRPGQGLE | | caaaacttcaggctataccttcacatcctattacatccagtggctgaagcaacgccctggacaag | |
| HM268- | | WIGWIYFGDASTKYNEKFKGRVT | | ggctcgaatggatcgggtggatctactttggggacgcttctaccaagtacaacgagaagtttaag | |
| K8- | | MTADKSTSTAYMELRSLRSDDTA | | ggacgagtgacaatgaccgccgacaagtccacaagcaccgcctacatggagctcagatccctcag | |
| X2-K | | VYYCASYYGSYFDYWGQGTTVTV | | gagcgatgataccgcagtctactattgcgcctcttattacgggtcctacttcgactattggggtc | |
| | | SSASTKGPSVFPLAPSSKSTSGG | | agggaacaacggttacagtctcttccgcctctactaaaggcccttctgtgtttcctctggctcca | |
| | | TAALGQLVKDYFPEPVTVSWNSG | | tcctctaagtcaaccagcggcggtactgctgctcttggctgtctggtgaaagactacttccccga | |
| | | ALTSGVHTFPAVLQSSGLYSLSS | | accagtgaccgtgagttggaacagtggcgcattgacaagcggagtacacacctttccagcagtgt | |
| | | VVTVPSSSLGTQTYICNVNHKPS | | tgcagtccagcggcctgtatagcctttcctctgtggtgactgtgccctcaagtagcctgggaacg | |
| | | NTKVDKKVEPKSCDKTHTCPPCP | | cagacatacatctgcaacgtgaaccacaagccctccaacaccaaggtggacaagaaggtcgagcc | |
| | | APELLDGPSVFLFPPKPKQTLMI | | caagtcctgcgacaagacccacacctgccccccctgccccgcccccgagctgctggacggcccct | |
| | | SRTPEVTCVVVDVSDEDPEVKFN | | ccgtgttcctgttcccccccaagcccaaggacaccctgatgatctccaggacccccgaggtgacc | |
| | | WYVDGVEVHNAKTKPREEQYNST | | tgcgtggtggtggacgtgtccgacgaggaccccgaggtgaagttcaactggtacgtggacggcgt | |
| | | YRVVSVLTVLHQDWLNGKEYKCA | | ggaggtgcacaacgccaagaccaagcccagggaggagcagtacaactccacctacagggtggtgt | |
| | | VSNKALPAPIEKTISKAKGQPRE | | ccgtgctgaccgtgctgcaccaggactggctgaacggcaaggagtacaagtgcgccgtgtccaac | |
| | | PQVYTLPPSRDELTKNQVSLTCL | | aaggccctgcccgcccccatcgagaagaccatctccaaggccaagggccagcccagggagcccca | |
| | | VKGFYPSDIAVEWESNGQPENNY | | ggtgtacaccctgcccccctccagggacgagctgaccaagaaccaggtgtccctgacctgcctgg | |
| | | KTTPPVLDSDGSFFLYSKLTVDK | | tgaagggcttctacccctccgacatcgccgtggagtgggagtccaacggccagcccgagaacaac | |
| | | SRWQQGNVFSCSVMHEALHNHYT | | tacaagaccaccccccccgtgctggactccgacggctccttcttcctgtactccaagctgaccgt | |
| | | QKSLSLSPGK | | ggacaagtccaggtggcagcagggcaacgtgttctcctgctccgtgatgcacgaggccctgcaca | |
| | | | | accactacacccagaagtccctgtccctgtcccccggcaag | |
| | Light | DIQMTQSPSSLSASVGDRVTITC | 267 | gacattcagatgacccaatctccatcttccctgtctgcttcagtcggagatcgggtcactatcac | 268 |
| | Chain | RASQDISNYLNWYQQKPDGTVKL | | ctgtagagccagtcaggacataagcaactacctgaactggtatcagcagaaacccgatggtaccg | |
| | | LIYSTSRLHSGVPSRFSGSGSGT | | tgaaactcctgatctatagcactagcaggctgcattccggtgttccatccaggttttctggctcc | |
| | | DYTLTISSLQPEDFATYYCQQGS | | ggttcaggcacagactacacgctcactatcagttcactgcaacctgaggatttcgccacatacta | |
| | | TLPFTFGQGTKLEIKRTVAAPSV | | ctgccagcaaggctcaacactgccctttacctttgggcaaggcaccaagttggagattaagcgga | |
| | | FIFPPSDEQLKSGTASVVCLLNN | | cagtggctgcacctagtgtgttcatctttcctcccagcgatgagcagctgaaatccgggacagct | |
| | | FYPREAKVQWKVDNALQSGNSQE | | tctgtggtgtgcttgctgaacaacttctatccacgagaagctaaggtccagtggaaggtagacaa | |
| | | SVTEQDSKDSTYSLSSTLTLSKA | | tgcccttcagtccggcaattcccaggagagtgttaccgaacaggacagcaaggactctacttaca | |
| | | DYEKHKVYACEVTHQGLSSPVTK | | gcctgtctagcacgcttaccctgtccaaagccgattacgagaagcacaaagtgtatgcctgtgaa | |
| | | SFNRGEC | | gtgacacatcaggggcttagttcacccgtaaccaagagcttcaatcgtggagaatgc | |
| human- | Heavy | QVQLVQSGPEVKKPGASVKVVCK | 269 | caggtgcagctggttcagtccgggcctgaggtgaagaagcccggcgctagtgtgaaggtcgtctg | 270 |
| ized | Chain | TSGYTFTSYYIQWLKQRPGQGLE | | caaaacttcaggctataccttcacatcctattacatccagtggctgaagcaacgccctggacaag | |
| HM268- | | WIGWIYFGDASTKYNEKFKGRVT | | ggctcgaatggatcgggtggatctactttggggacgcttctaccaagtacaacgagaagtttaag | |
| K8- | | MTADKSTSTAYMELRSLRSDDTA | | ggacgagtgacaatgaccgccgacaagtccacaagcaccgcctacatggagctcagatccctcag | |
| X3-K | | VYYCASYYGSYFDYWGQGTTVTV | | gagcgatgataccgcagtctactattgcgcctcttattacgggtcctacttcgactattggggtc | |
| | | SSASTKGPSVFPLAPSSKSTSGG | | agggaacaacggttacagtctcttccgcctccaccaaaggcccctctgtgtttccactggcacca | |
| | | TAALGCLVKDYFPEPVTVSWNSG | | agctcaaagtcaaccagtggtggaaccgctgctctgggctgtctggttaaggactatttccccga | |
| | | ALTSGVHTFPAVLQSSGLYSLSS | | acctgtaaccgtaagctggaatagtggcgcactgacctccggggtccacacatttcccgccgtgc | |
| | | VVTVPSSSLGTQTYICNVNHKPS | | tgcagagttcaggcctctattccctcagctccgtcgtgactgtcccctcctcttcccttggtact | |
| | | NTKVDKKVEPKSCDKTHTCPPCP | | cagacttacatctgcaacgtgaaccacaagccctccaacaccaaggtggacaagaaggtcgagcc | |
| | | APELLGGPDVFLFPPKPKQTLMI | | caagtcctgcgacaagacccacacctgccccccctgccccgcccccgagctgctgggcggccccg | |
| | | SRTPEVTCVVVDVSDEDPEVKFN | | acgtgttcctgttcccccccaagcccaaggacaccctgatgatctccaggacccccgaggtgacc | |
| | | WYVDGVEVHNAKTKPREEQYNST | | tgcgtggtggtggacgtgagtgacgaggaccccgaggtgaagttcaactggtacgtggacggcgt | |
| | | YRVVSVLTVLHQDWLNGKEYKCA | | ggaggtgcacaacgccaagaccaagcccagggaggagcagtacaactccacctacagggtggtgt | |
| | | VSNKALPAPIEKTISKAKGQPRE | | ccgtgctgaccgtgctgcaccaggactggctgaacggcaaggagtacaagtgcgccgtgtccaac | |
| | | PQVYTLPPSRDELTKNQVSLTCL | | aaggccctgcccgcccccatcgagaagaccatctccaaggccaagggccagcccagggagcccca | |
| | | VKGFYPSDIAVEWESNGQPENNY | | ggtgtacaccctgcccccctccagggacgagctgaccaagaaccaggtgtccctgacctgcctgg | |
| | | KTTPPVLDSDGSFFLYSKLTVDK | | tgaagggcttctacccctccgacatcgccgtggagtgggagtccaacggccagcccgagaacaac | |
| | | SRWQQGNVFSCSVMHEALHNHYT | | tacaagaccaccccccccgtgctggactccgacggctccttcttcctgtactccaagctgaccgt | |
| | | QKSLSLSPGK | | ggacaagtccaggtggcagcagggcaacgtgttctcctgctccgtgatgcacgaggccctgcaca | |
| | | | | accactacacccagaagtccctgtccctgtcccccggcaag | |
| | Light | DIQMTQSPSSLSASVGDRVTITC | 271 | gacattcagatgacccaatctccatcttccctgtctgcttcagtcggagatcgggtcactatcac | 272 |
| | Chain | RASQDISNYLNWYQQKPDGTVKL | | ctgtagagccagtcaggacataagcaactacctgaactggtatcagcagaaacccgatggtaccg | |
| | | LIYSTSRLHSGVPSRFSGSGSGT | | tgaaactcctgatctatagcactagcaggctgcattccggtgttccatccaggttttctggctcc | |
| | | DYTLTISSLQPEDFATYYCQQGS | | ggttcaggcacagactacacgctcactatcagttcactgcaacctgaggatttcgccacatacta | |
| | | TLPFTFGQGTKLEIKRTVAAPSV | | ctgccagcaaggctcaacactgccctttacctttgggcaaggcaccaagttggagattaagcgga | |
| | | FIFPPSDEQLKSGTASVVCLLNN | | cagtggctgcacctagtgtgttcatctttcctcccagcgatgagcagctgaaatccgggacagct | |
| | | FYPREAKVQWKVDNALQSGNSQE | | tctgtggtgtgcttgctgaacaacttctatccacgagaagctaaggtccagtggaaggtagacaa | |
| | | SVTEQDSKDSTYSLSSTLTLSKA | | tgcccttcagtccggcaattcccaggagagtgttaccgaacaggacagcaaggactctacttaca | |
| | | DYEKHKVYACEVTHQGLSSPVTK | | gcctgtctagcacgcttaccctgtccaaagccgattacgagaagcacaaagtgtatgcctgtgaa | |
| | | SFNRGEC | | gtgacacatcaggggcttagttcacccgtaaccaagagcttcaatcgtggagaatgc | |
| human- | Heavy | QVQLVQSGPEVKKPGASVKVVCK | 273 | caggtgcagctggttcagtccgggcctgaggtgaagaagcccggcgctagtgtgaaggtcgtctg | 274 |
| ized | Chain | TSGYTFTSYYIQWLKQRPGQGLE | | caaaacttcaggctataccttcacatcctattacatccagtggctgaagcaacgccctggacaag | |
| HM268- | | WIGWIYFGDASTKYNEKFKGRVT | | ggctcgaatggatcgggtggatctactttggggacgcttctaccaagtacaacgagaagtttaag | |
| K8- | | MTADKSTSTAYMELRSLRSDDTA | | ggacgagtgacaatgaccgccgacaagtccacaagcaccgcctacatggagctcagatccctcag | |
| X3-KE | | VYYCASYYGSYFDYWGQGTTVTV | | gagcgatgataccgcagtctactattgcgcctcttattacgggtcctacttcgactattggggtc | |
| | | SSASTKGPSVFPLAPSSKSTSGG | | agggaacaacggttacagtctcttccgcctccaccaaaggcccctctgtgtttccactggcacca | |
| | | TAALGQLVKDYFPEPVTVSWNSG | | agctcaaagtcaaccagtggtggaaccgctgctctgggctgtctggttaaggactatttccccga | |
| | | ALTSGVHTFPAVLQSSGLYSLSS | | acctgtaaccgtaagctggaatagtggcgcactgacctccggggtccacacatttcccgccgtgc | |
| | | VVTVPSSSLGTQTYICNVNHKPS | | tgcagagttcaggcctctattccctcagctccgtcgtgactgtcccctcctcttcccttggtact | |
| | | NTKVDKKVEPKSCDKTHTCPPCP | | cagacttacatctgcaacgtgaaccacaagccctccaacaccaaggtggacaagaaggtcgagcc | |
| | | APELLGGPDVFLFPPKPKQTLMI | | caagtcctgcgacaagacccacacctgccccccctgccccgcccccgagctgctgggcggccccg | |
| | | SRTPEVTCVVVDVSDEDPEVKFN | | acgtgttcctgttcccccccaagcccaaggacaccctgatgatctccaggacccccgaggtgacc | |
| | | WYVDGVEVHNAKTKPRAEQYNST | | tgcgtggtggtggacgtgagtgacgaggaccccgaggtgaagttcaactggtacgtggacggcgt | |
| | | YRVVSVLTVLHQDWLNGKEYKCA | | ggaggtgcacaacgccaagaccaagcccagggccgagcagtacaactccacctacagggtggtgt | |
| | | VSNKALPAPIEKTISKAKGQPRE | | ccgtgctgaccgtgctgcaccaggactggctgaacggcaaggagtacaagtgcgccgtgtccaac | |
| | | PQVYTLPPSRDELTKNQVSLTCL | | aaggccctgcccgcccccatcgagaagaccatctccaaggccaagggccagcccagggagcccca | |
| | | VKGFYPSDIAVEWESNGQPENNY | | ggtgtacaccctgcccccctccagggacgagctgaccaagaaccaggtgtccctgacctgcctgg | |
| | | KTTPPVLDSDGSFFLYSKLTVDK | | tgaagggcttctacccctccgacatcgccgtggagtgggagtccaacggccagcccgagaacaac | |
| | | SRWQQGNVFSCSVMHEALHNHYT | | tacaagaccaccccccccgtgctggactccgacggctccttcttcctgtactccaagctgaccgt | |
| | | QKSLSLSPGK | | ggacaagtccaggtggcagcagggcaacgtgttctcctgctccgtgatgcacgaggccctgcaca | |
| | | | | accactacacccagaagtccctgtccctgtcccccggcaag | |
| | Light | DIQMTQSPSSLSASVGDRVTITC | 275 | gacattcagatgacccaatctccatcttccctgtctgcttcagtcggagatcgggtcactatcac | 276 |
| | Chain | RASQDISNYLNWYQQKPDGTVKL | | ctgtagagccagtcaggacataagcaactacctgaactggtatcagcagaaacccgatggtaccg | |
| | | LIYSTSRLHSGVPSRFSGSGSGT | | tgaaactcctgatctatagcactagcaggctgcattccggtgttccatccaggttttctggctcc | |
| | | DYTLTISSLQPEDFATYYCQQGS | | ggttcaggcacagactacacgctcactatcagttcactgcaacctgaggatttcgccacatacta | |
| | | TLPFTFGQGTKLEIKRTVAAPSV | | ctgccagcaaggctcaacactgccctttacctttgggcaaggcaccaagttggagattaagcgga | |
| | | FIFPPSDEQLKSGTASVVCLLNN | | cagtggctgcacctagtgtgttcatctttcctcccagcgatgagcagctgaaatccgggacagct | |
| | | FYPREAKVQWKVDNALQSGNSQE | | tctgtggtgtgcttgctgaacaacttctatccacgagaagctaaggtccagtggaaggtagacaa | |
| | | SVTEQDSKDSTYSLSSTLTLSKA | | tgcccttcagtccggcaattcccaggagagtgttaccgaacaggacagcaaggactctacttaca | |
| | | DYEKHKVYACEVTHQGLSSPVTK | | gcctgtctagcacgcttaccctgtccaaagccgattacgagaagcacaaagtgtatgcctgtgaa | |
| | | SFNRGEC | | gtgacacatcaggggcttagttcacccgtaaccaagagcttcaatcgtggagaatgc | |
| human- | Heavy | QVQLVQSGPEVKKPGASVKVVCK | 277 | caggtgcagctggttcagtccgggcctgaggtgaagaagcccggcgctagtgtgaaggtcgtctg | 278 |
| ized | Chain | TSGYTFTSYYIQWLKQRPGQGLE | | caaaacttcaggctataccttcacatcctattacatccagtggctgaagcaacgccctggacaag | |
| HM268- | | WIGWIYFGDASTKYNEKFKGRVT | | ggctcgaatggatcgggtggatctactttggggacgcttctaccaagtacaacgagaagtttaag | |
| K8- | | MTADKSTSTAYMELRSLRSDDTA | | ggacgagtgacaatgaccgccgacaagtccacaagcaccgcctacatggagctcagatccctcag | |
| X3-KI | | VYYCASYYGSYFDYWGQGTTVTV | | gagcgatgataccgcagtctactattgcgcctcttattacgggtcctacttcgactattggggtc | |
| | | SSASTKGPSVFPLAPSSKSTSGG | | agggaacaacggttacagtctcttccgcctccaccaaaggcccctctgtgtttccactggcacca | |
| | | TAALGCLVKDYFPEPVTVSWNSG | | agctcaaagtcaaccagtggtggaaccgctgctctgggctgtctggttaaggactatttccccga | |
| | | ALTSGVHTFPAVLQSSGLYSLSS | | acctgtaaccgtaagctggaatagtggcgcactgacctccggggtccacacatttcccgccgtgc | |
| | | VVTVPSSSLGTQTYICNVNHKPS | | tgcagagttcaggcctctattccctcagctccgtcgtgactgtcccctcctcttcccttggtact | |
| | | NTKVDKKVEPKSCDKTHTCPPCP | | cagacttacatctgcaacgtgaaccacaagccctccaacaccaaggtggacaagaaggtcgagcc | |
| | | APELLGGPDVFLFPPKPKQTLMI | | caagtcctgcgacaagacccacacctgccccccctgccccgcccccgagctgctgggcggccccg | |
| | | SRTPEVTCVVVDVSDEDPEVKFN | | acgtgttcctgttcccccccaagcccaaggacaccctgatgatctccaggacccccgaggtgacc | |
| | | WYVDGVEVHNAKTKPREEQYNST | | tgcgtggtggtggacgtgTCCgacgaggaccccgaggtgaagttcaactggtacgtggacggcgt | |
| | | YRVVSVLTVLHQDWLNGKEYKCA | | ggaggtgcacaacgccaagaccaagcccagggaggagcagtacaactccacctacagggtggtgt | |
| | | VSNKALPAPEEKTISKAKGQPRE | | ccgtgctgaccgtgctgcaccaggactggctgaacggcaaggagtacaagtgcgccgtgtccaac | |
| | | PQVYTLPPSRDELTKNQVSLTCL | | aaggccctgcccgcccccGAGgagaagaccatctccaaggccaagggccagcccagggagcccca | |
| | | VKGFYPSDIAVEWESNGQPENNY | | ggtgtacaccctgcccccctccagggacgagctgaccaagaaccaggtgtccctgacctgcctgg | |
| | | KTTPPVLDSDGSFFLYSKLTVDK | | tgaagggcttctacccctccgacatcgccgtggagtgggagtccaacggccagcccgagaacaac | |
| | | SRWQQGNVFSCSVMHEALHNHYT | | tacaagaccaccccccccgtgctggactccgacggctccttcttcctgtactccaagctgaccgt | |
| | | QKSLSLSPGK | | ggacaagtccaggtggcagcagggcaacgtgttctcctgctccgtgatgcacgaggccctgcaca | |
| | | | | accactacacccagaagtccctgtccctgtcccccggcaag | |
| | Light | DIQMTQSPSSLSASVGDRVTITC | 279 | gacattcagatgacccaatctccatcttccctgtctgcttcagtcggagatcgggtcactatcac | 280 |
| | Chain | RASQDISNYLNWYQQKPDGTVKL | | ctgtagagccagtcaggacataagcaactacctgaactggtatcagcagaaacccgatggtaccg | |
| | | LIYSTSRLHSGVPSRFSGSGSGT | | tgaaactcctgatctatagcactagcaggctgcattccggtgttccatccaggttttctggctcc | |
| | | DYTLTISSLQPEDFATYYCQQGS | | ggttcaggcacagactacacgctcactatcagttcactgcaacctgaggatttcgccacatacta | |
| | | TLPFTFGQGTKLEIKRTVAAPSV | | ctgccagcaaggctcaacactgccctttacctttgggcaaggcaccaagttggagattaagcgga | |
| | | FIFPPSDEQLKSGTASVVCLLNN | | cagtggctgcacctagtgtgttcatctttcctcccagcgatgagcagctgaaatccgggacagct | |
| | | FYPREAKVQWKVDNALQSGNSQE | | tctgtggtgtgcttgctgaacaacttctatccacgagaagctaaggtccagtggaaggtagacaa | |
| | | SVTEQDSKDSTYSLSSTLTLSKA | | tgcccttcagtccggcaattcccaggagagtgttaccgaacaggacagcaaggactctacttaca | |
| | | DYEKHKVYACEVTHQGLSSPVTK | | gcctgtctagcacgcttaccctgtccaaagccgattacgagaagcacaaagtgtatgcctgtgaa | |
| | | SFNRGEC | | gtgacacatcaggggcttagttcacccgtaaccaagagcttcaatcgtggagaatgc | |
| human- | Heavy | QVQLVQSGPEVKKPGASVKVVCK | 281 | caggtgcagctggttcagtccgggcctgaggtgaagaagcccggcgctagtgtgaaggtcgtctg | 282 |
| ized | Chain | TSGYTFTSYYIQWLKQRPGQGLE | | caaaacttcaggctataccttcacatcctattacatccagtggctgaagcaacgccctggacaag | |
| HM268- | | WIGWIYFGDASTKYNEKFKGRVT | | ggctcgaatggatcgggtggatctactttggggacgcttctaccaagtacaacgagaagtttaag | |
| K8- | | MTADKSTSTAYMELRSLRSDDTA | | ggacgagtgacaatgaccgccgacaagtccacaagcaccgcctacatggagctcagatccctcag | |
| X3-KL | | VYYCASYYGSYFDYWGQGTTVTV | | gagcgatgataccgcagtctactattgcgcctcttattacgggtcctacttcgactattggggtc | |
| | | SSASTKGPSVFPLAPSSKSTSGG | | agggaacaacggttacagtctcttccgcctccaccaaaggcccctctgtgtttccactggcacca | |
| | | TAALGQLVKDYFPEPVTVSWNSG | | agctcaaagtcaaccagtggtggaaccgctgctctgggctgtctggttaaggactatttccccga | |
| | | ALTSGVHTFPAVLQSSGLYSLSS | | acctgtaaccgtaagctggaatagtggcgcactgacctccggggtccacacatttcccgccgtgc | |
| | | VVTVPSSSLGTQTYICNVNHKPS | | tgcagagttcaggcctctattccctcagctccgtcgtgactgtcccctcctcttcccttggtact | |
| | | NTKVDKKVEPKSCDKTHTCPPCP | | cagacttacatctgcaacgtgaaccacaagccctccaacaccaaggtggacaagaaggtcgagcc | |
| | | APELLGGPDVFLFPPKPKQTLMI | | caagtcctgcgacaagacccacacctgccccccctgccccgcccccgagctgctgggcggccccg | |
| | | SRTPEVTCVVVDVSDEDPEVKFN | | acgtgttcctgttcccccccaagcccaaggacaccctgatgatctccaggacccccgaggtgacc | |
| | | WYVDGVEVHNAKTKPREEQYNST | | tgcgtggtggtggacgtgTCCgacgaggaccccgaggtgaagttcaactggtacgtggacggcgt | |
| | | YRVVSVLTVLHQDWLNGKEYKCA | | ggaggtgcacaacgccaagaccaagcccagggaggagcagtacaactccacctacagggtggtgt | |
| | | VSNKAYPAPIEKTISKAKGQPRE | | ccgtgctgaccgtgctgcaccaggactggctgaacggcaaggagtacaagtgcgccgtgtccaac | |
| | | PQVYTLPPSRDELTKNQVSLTCL | | aaggccTACcccgcccccatcgagaagaccatctccaaggccaagggccagcccagggagcccca | |
| | | VKGFYPSDIAVEWESNGQPENNY | | ggtgtacaccctgcccccctccagggacgagctgaccaagaaccaggtgtccctgacctgcctgg | |
| | | KTTPPVLDSDGSFFLYSKLTVDK | | tgaagggcttctacccctccgacatcgccgtggagtgggagtccaacggccagcccgagaacaac | |
| | | SRWQQGNVFSCSVMHEALHNHYT | | tacaagaccaccccccccgtgctggactccgacggctccttcttcctgtactccaagctgaccgt | |
| | | QKSLSLSPGK | | ggacaagtccaggtggcagcagggcaacgtgttctcctgctccgtgatgcacgaggccctgcaca | |
| | | | | accactacacccagaagtccctgtccctgtcccccggcaag | |
| | Light | DIQMTQSPSSLSASVGDRVTITC | 283 | gacattcagatgacccaatctccatcttccctgtctgcttcagtcggagatcgggtcactatcac | 284 |
| | Chain | RASQDISNYLNWYQQKPDGTVKL | | ctgtagagccagtcaggacataagcaactacctgaactggtatcagcagaaacccgatggtaccg | |
| | | LIYSTSRLHSGVPSRFSGSGSGT | | tgaaactcctgatctatagcactagcaggctgcattccggtgttccatccaggttttctggctcc | |
| | | DYTLTISSLQPEDFATYYCQQGS | | ggttcaggcacagactacacgctcactatcagttcactgcaacctgaggatttcgccacatacta | |
| | | TLPFTFGQGTKLEIKRTVAAPSV | | ctgccagcaaggctcaacactgccctttacctttgggcaaggcaccaagttggagattaagcgga | |
| | | FIFPPSDEQLKSGTASVVCLLNN | | cagtggctgcacctagtgtgttcatctttcctcccagcgatgagcagctgaaatccgggacagct | |
| | | FYPREAKVQWKVDNALQSGNSQE | | tctgtggtgtgcttgctgaacaacttctatccacgagaagctaaggtccagtggaaggtagacaa | |
| | | SVTEQDSKDSTYSLSSTLTLSKA | | tgcccttcagtccggcaattcccaggagagtgttaccgaacaggacagcaaggactctacttaca | |
| | | DYEKHKVYACEVTHQGLSSPVTK | | gcctgtctagcacgcttaccctgtccaaagccgattacgagaagcacaaagtgtatgcctgtgaa | |
| | | SFNRGEC | | gtgacacatcaggggcttagttcacccgtaaccaagagcttcaatcgtggagaatgc | |
| human- | Heavy | QVQLVQSGPEVKKPGASVKVVCK | 285 | caggtgcagctggttcagtccgggcctgaggtgaagaagcccggcgctagtgtgaaggtcgtctg | 286 |
| ized | Chain | TSGYTFTSYYIQWLKQRPGQGLE | | caaaacttcaggctataccttcacatcctattacatccagtggctgaagcaacgccctggacaag | |
| HM268- | | WIGWIYFGDASTKYNEKFKGRVT | | ggctcgaatggatcgggtggatctactttggggacgcttctaccaagtacaacgagaagtttaag | |
| K8- | | MTADKSTSTAYMELRSLRSDDTA | | ggacgagtgacaatgaccgccgacaagtccacaagcaccgcctacatggagctcagatccctcag | |
| X3-KS | | VYYCASYYGSYFDYWGQGTTVTV | | gagcgatgataccgcagtctactattgcgcctcttattacgggtcctacttcgactattggggtc | |
| | | SSASTKGPSVFPLAPSSKSTSGG | | agggaacaacggttacagtctcttccgcctctactaaaggcccttctgtgtttcctctggctcca | |
| | | TAALGCLVKDYFPEPVTVSWNSG | | tcctctaagtcaaccagcggcggtactgctgctcttggctgtctggtgaaagactacttccccga | |
| | | ALTSGVHTFPAVLQSSGLYSLSS | | accagtgaccgtgagttggaacagtggcgcattgacaagcggagtacacacctttccagcagtgt | |
| | | VVTVPSSSLGTQTYICNVNHKPS | | tgcagtccagcggcctgtatagcctttcctctgtggtgactgtgccctcaagtagcctgggaacg | |
| | | NTKVDKKVEPKSCDKTHTCPPCP | | cagacatacatctgcaacgtgaaccacaagccctccaacaccaaggtggacaagaaggtcgagcc | |
| | | APELLGGPDVFLFPPKPKQTLMI | | caagtcctgcgacaagacccacacctgccccccctgccccgcccccgagctgctgggcggccccg | |
| | | SRTPEVTCVVVDVGDEDPEVKFN | | acgtgttcctgttcccccccaagcccaaggacaccctgatgatctccaggacccccgaggtgacc | |
| | | WYVDGVEVHNAKTKPREEQYNST | | tgcgtggtggtggacgtgggcgacgaggaccccgaggtgaagttcaactggtacgtggacggcgt | |
| | | YRVVSVLTVLHQDWLNGKEYKCA | | ggaggtgcacaacgccaagaccaagcccagggaggagcagtacaactccacctacagggtggtgt | |
| | | VSNKALPAPIEKTISKAKGQPRE | | ccgtgctgaccgtgctgcaccaggactggctgaacggcaaggagtacaagtgcgccgtgtccaac | |
| | | PQVYTLPPSRDELTKNQVSLTCL | | aaggccctgcccgcccccatcgagaagaccatctccaaggccaagggccagcccagggagcccca | |
| | | VKGFYPSDIAVEWESNGQPENNY | | ggtgtacaccctgcccccctccagggacgagctgaccaagaaccaggtgtccctgacctgcctgg | |
| | | KTTPPVLDSDGSFFLYSKLTVDK | | tgaagggcttctacccctccgacatcgccgtggagtgggagtccaacggccagcccgagaacaac | |
| | | SRWQQGNVFSCSVMHEALHNHYT | | tacaagaccaccccccccgtgctggactccgacggctccttcttcctgtactccaagctgaccgt | |
| | | QKSLSLSPGK | | ggacaagtccaggtggcagcagggcaacgtgttctcctgctccgtgatgcacgaggccctgcaca | |
| | | | | accactacacccagaagtccctgtccctgtcccccggcaag | |
| | Light | DIQMTQSPSSLSASVGDRVTITQ | 287 | gacattcagatgacccaatctccatcttccctgtctgcttcagtcggagatcgggtcactatcac | 288 |
| | Chain | RASQDISNYLNWYQQKPDGTVKL | | ctgtagagccagtcaggacataagcaactacctgaactggtatcagcagaaacccgatggtaccg | |
| | | LIYSTSRLHSGVPSRFSGSGSGT | | tgaaactcctgatctatagcactagcaggctgcattccggtgttccatccaggttttctggctcc | |
| | | DYTLTISSLQPEDFATYYCQQGS | | ggttcaggcacagactacacgctcactatcagttcactgcaacctgaggatttcgccacatacta | |
| | | TLPFTFGQGTKLEIKRTVAAPSV | | ctgccagcaaggctcaacactgccctttacctttgggcaaggcaccaagttggagattaagcgga | |
| | | FIFPPSDEQLKSGTASVVQLLNN | | cagtggctgcacctagtgtgttcatctttcctcccagcgatgagcagctgaaatccgggacagct | |
| | | FYPREAKVQWKVDNALQSGNSQE | | tctgtggtgtgcttgctgaacaacttctatccacgagaagctaaggtccagtggaaggtagacaa | |
| | | SVTEQDSKDSTYSLSSILTLSKA | | tgcccttcagtccggcaattcccaggagagtgttaccgaacaggacagcaaggactctacttaca | |
| | | DYEKHKVYACEVTHQGLSSPVTK | | gcctgtctagcacgcttaccctgtccaaagccgattacgagaagcacaaagtgtatgcctgtgaa | |
| | | SFNRGEC | | gtgacacatcaggggcttagttcacccgtaaccaagagcttcaatcgtggagaatgc | |
| human- | Heavy | QVQLVQSGPEVKKPGASVKVVCK | 289 | caggtgcagctggttcagtccgggcctgaggtgaagaagcccggcgctagtgtgaaggtcgtctg | 290 |
| ized | Chain | TSGYTFTSYYIQWLKQRPGQGLE | | caaaacttcaggctataccttcacatcctattacatccagtggctgaagcaacgccctggacaag | |
| HM268- | | WIGWIYFGDASTKYNEKFKGRVT | | ggctcgaatggatcgggtggatctactttggggacgcttctaccaagtacaacgagaagtttaag | |
| K8-X3- | | MTADKSTSTAYMELRSLRSDDTA | | ggacgagtgacaatgaccgccgacaagtccacaagcaccgcctacatggagctcagatccctcag | |
| KSI | | VYYCASYYGSYFDYWGQGTTVTV | | gagcgatgataccgcagtctactattgcgcctcttattacgggtcctacttcgactattggggtc | |
| | | SSASTKGPSVFPLAPSSKSTSGG | | agggaacaacggttacagtctcttccgcctccaccaaaggcccctctgtgtttccactggcacca | |
| | | TAALGQLVKDYFPEPVTVSWNSG | | agctcaaagtcaaccagtggtggaaccgctgctctgggctgtctggttaaggactatttccccga | |
| | | ALTSGVHTFPAVLQSSGLYSLSS | | acctgtaaccgtaagctggaatagtggcgcactgacctccggggtccacacatttcccgccgtgc | |
| | | VVTVPSSSLGTQTYICNVNHKPS | | tgcagagttcaggcctctattccctcagctccgtcgtgactgtcccctcctcttcccttggtact | |
| | | NTKVDKKVEPKSCDKTHTCPPQP | | cagacttacatctgcaacgtgaaccacaagccctccaacaccaaggtggacaagaaggtcgagcc | |
| | | APELLGGPDVFLFPPKPKQTLMI | | caagtcctgcgacaagacccacacctgccccccctgccccgcccccgagctgctgggcggccccg | |
| | | SRTPEVTCVVVDVGDEDPEVKFN | | acgtgttcctgttcccccccaagcccaaggacaccctgatgatctccaggacccccgaggtgacc | |
| | | WYVDGVEVHNAKTKPREEQYNST | | tgcgtggtggtggacgtgGGCgacgaggaccccgaggtgaagttcaactggtacgtggacggcgt | |
| | | YRVVSVLTVLHQDWLNGKEYKCA | | ggaggtgcacaacgccaagaccaagcccagggaggagcagtacaactccacctacagggtggtgt | |
| | | VSNKALPAPEEKTISKAKGQPRE | | ccgtgctgaccgtgctgcaccaggactggctgaacggcaaggagtacaagtgcgccgtgtccaac | |
| | | PQVYTLPPSRDELTKNQVSLTCL | | aaggccctgcccgcccccGAGgagaagaccatctccaaggccaagggccagcccagggagcccca | |
| | | VKGFYPSDIAVEWESNGQPENNY | | ggtgtacaccctgcccccctccagggacgagctgaccaagaaccaggtgtccctgacctgcctgg | |
| | | KTTPPVLDSDGSFFLYSKLTVDK | | tgaagggcttctacccctccgacatcgccgtggagtgggagtccaacggccagcccgagaacaac | |
| | | SRWQQGNVFSCSVMHEALHNHYT | | tacaagaccaccccccccgtgctggactccgacggctccttcttcctgtactccaagctgaccgt | |
| | | QKSLSLSPGK | | ggacaagtccaggtggcagcagggcaacgtgttctcctgctccgtgatgcacgaggccctgcaca | |
| | | | | accactacacccagaagtccctgtccctgtcccccggcaag | |
| | Light | DIQMTQSPSSLSASVGDRVTITC | 291 | gacattcagatgacccaatctccatcttccctgtctgcttcagtcggagatcgggtcactatcac | 292 |
| | Chain | RASQDISNYLNWYQQKPDGTVKL | | ctgtagagccagtcaggacataagcaactacctgaactggtatcagcagaaacccgatggtaccg | |
| | | LIYSTSRLHSGVPSRFSGSGSGT | | tgaaactcctgatctatagcactagcaggctgcattccggtgttccatccaggttttctggctcc | |
| | | DYTLTISSLQPEDFATYYCQQGS | | ggttcaggcacagactacacgctcactatcagttcactgcaacctgaggatttcgccacatacta | |
| | | TLPFTFGQGTKLEIKRTVAAPSV | | ctgccagcaaggctcaacactgccctttacctttgggcaaggcaccaagttggagattaagcgga | |
| | | FIFPPSDEQLKSGTASVVCLLNN | | cagtggctgcacctagtgtgttcatctttcctcccagcgatgagcagctgaaatccgggacagct | |
| | | FYPREAKVQWKVDNALQSGNSQE | | tctgtggtgtgcttgctgaacaacttctatccacgagaagctaaggtccagtggaaggtagacaa | |
| | | SVTEQDSKDSTYSLSSTLTLSKA | | tgcccttcagtccggcaattcccaggagagtgttaccgaacaggacagcaaggactctacttaca | |
| | | DYEKHKVYACEVTHQGLSSPVTK | | gcctgtctagcacgcttaccctgtccaaagccgattacgagaagcacaaagtgtatgcctgtgaa | |
| | | SFNRGEC | | gtgacacatcaggggcttagttcacccgtaaccaagagcttcaatcgtggagaatgc | |
| human- | Heavy | QVQLVQSGPEVKKPGASVKVVCK | 293 | caggtgcagctggttcagtccgggcctgaggtgaagaagcccggcgctagtgtgaaggtcgtctg | 294 |
| ized | Chain | TSGYTFTSYYIQWLKQRPGQGLE | | caaaacttcaggctataccttcacatcctattacatccagtggctgaagcaacgccctggacaag | |
| HM268- | | WIGWIYFGDASTKYNEKFKGRVT | | ggctcgaatggatcgggtggatctactttggggacgcttctaccaagtacaacgagaagtttaag | |
| K8-X3- | | MTADKSTSTAYMELRSLRSDDTA | | ggacgagtgacaatgaccgccgacaagtccacaagcaccgcctacatggagctcagatccctcag | |
| KSL | | VYYCASYYGSYFDYWGQGTTVTV | | gagcgatgataccgcagtctactattgcgcctcttattacgggtcctacttcgactattggggtc | |
| | | SSASTKGPSVFPLAPSSKSTSGG | | agggaacaacggttacagtctcttccgcctccaccaaaggcccctctgtgtttccactggcacca | |
| | | TAALGCLVKDYFPEPVTVSWNSG | | agctcaaagtcaaccagtggtggaaccgctgctctgggctgtctggttaaggactatttccccga | |
| | | ALTSGVHTFPAVLQSSGLYSLSS | | acctgtaaccgtaagctggaatagtggcgcactgacctccggggtccacacatttcccgccgtgc | |
| | | VVTVPSSSLGTQTYICNVNHKPS | | tgcagagttcaggcctctattccctcagctccgtcgtgactgtcccctcctcttcccttggtact | |
| | | NTKVDKKVEPKSCDKTHTCPPCP | | cagacttacatctgcaacgtgaaccacaagccctccaacaccaaggtggacaagaaggtcgagcc | |
| | | APELLGGPDVFLFPPKPKQTLMI | | caagtcctgcgacaagacccacacctgccccccctgccccgcccccgagctgctgggcggccccg | |
| | | SRTPEVTCVVVDVGDEDPEVKFN | | acgtgttcctgttcccccccaagcccaaggacaccctgatgatctccaggacccccgaggtgacc | |
| | | WYVDGVEVHNAKTKPREEQYNST | | tgcgtggtggtggacgtgGGCgacgaggaccccgaggtgaagttcaactggtacgtggacggcgt | |
| | | YRVVSVLTVLHQDWLNGKEYKCA | | ggaggtgcacaacgccaagaccaagcccagggaggagcagtacaactccacctacagggtggtgt | |
| | | VSNKAYPAPIEKTISKAKGQPRE | | ccgtgctgaccgtgctgcaccaggactggctgaacggcaaggagtacaagtgcgccgtgtccaac | |
| | | PQVYTLPPSRDELTKNQVSLTCL | | aaggccTACcccgcccccatcgagaagaccatctccaaggccaagggccagcccagggagcccca | |
| | | VKGFYPSDIAVEWESNGQPENNY | | ggtgtacaccctgcccccctccagggacgagctgaccaagaaccaggtgtccctgacctgcctgg | |
| | | KTTPPVLDSDGSFFLYSKLTVDK | | tgaagggcttctacccctccgacatcgccgtggagtgggagtccaacggccagcccgagaacaac | |
| | | SRWQQGNVFSCSVMHEALHNHYT | | tacaagaccaccccccccgtgctggactccgacggctccttcttcctgtactccaagctgaccgt | |
| | | QKSLSLSPGK | | ggacaagtccaggtggcagcagggcaacgtgttctcctgctccgtgatgcacgaggccctgcaca | |
| | | | | accactacacccagaagtccctgtccctgtcccccggcaag | |
| | Light | DIQMTQSPSSLSASVGDRVTITC | 295 | gacattcagatgacccaatctccatcttccctgtctgcttcagtcggagatcgggtcactatcac | 296 |
| | Chain | RASQDISNYLNWYQQKPDGTVKL | | ctgtagagccagtcaggacataagcaactacctgaactggtatcagcagaaacccgatggtaccg | |
| | | LIYSTSRLHSGVPSRFSGSGSGT | | tgaaactcctgatctatagcactagcaggctgcattccggtgttccatccaggttttctggctcc | |
| | | DYTLTISSLQPEDFATYYCQQGS | | ggttcaggcacagactacacgctcactatcagttcactgcaacctgaggatttcgccacatacta | |
| | | TLPFTFGQGTKLEIKRTVAAPSV | | ctgccagcaaggctcaacactgccctttacctttgggcaaggcaccaagttggagattaagcgga | |
| | | FIFPPSDEQLKSGTASVVCLLNN | | cagtggctgcacctagtgtgttcatctttcctcccagcgatgagcagctgaaatccgggacagct | |
| | | FYPREAKVQWKVDNALQSGNSQE | | tctgtggtgtgcttgctgaacaacttctatccacgagaagctaaggtccagtggaaggtagacaa | |
| | | SVTEQDSKDSTYSLSSTLTLSKA | | tgcccttcagtccggcaattcccaggagagtgttaccgaacaggacagcaaggactctacttaca | |
| | | DYEKHKVYACEVTHQGLSSPVTK | | gcctgtctagcacgcttaccctgtccaaagccgattacgagaagcacaaagtgtatgcctgtgaa | |
| | | SFNRGEC | | gtgacacatcaggggcttagttcacccgtaaccaagagcttcaatcgtggagaatgc | |
| human- | Heavy | QVQLVQSGPEVKKPGASVKVVCK | 297 | caggtgcagctggttcagtccgggcctgaggtgaagaagcccggcgctagtgtgaaggtcgtctg | 298 |
| ized | Chain | TSGYTFTSYYIQWLKQRPGQGLE | | caaaacttcaggctataccttcacatcctattacatccagtggctgaagcaacgccctggacaag | |
| HM268- | | WIGWIYFGDASTKYNEKFKGRVT | | ggctcgaatggatcgggtggatctactttggggacgcttctaccaagtacaacgagaagtttaag | |
| K8- | | MTADKSTSTAYMELRSLRSDDTA | | ggacgagtgacaatgaccgccgacaagtccacaagcaccgcctacatggagctcagatccctcag | |
| X4-K | | VYYCASYYGSYFDYWGQGTTVTV | | gagcgatgataccgcagtctactattgcgcctcttattacgggtcctacttcgactattggggtc | |
| | | SSASTKGPSVFPLAPSSKSTSGG | | agggaacaacggttacagtctcttccgcctctactaaaggcccttctgtgtttcctctggctcca | |
| | | TAALGQLVKDYFPEPVTVSWNSG | | tcctctaagtcaaccagcggcggtactgctgctcttggctgtctggtgaaagactacttccccga | |
| | | ALTSGVHTFPAVLQSSGLYSLSS | | accagtgaccgtgagttggaacagtggcgcattgacaagcggagtacacacctttccagcagtgt | |
| | | VVTVPSSSLGTQTYICNVNHKPS | | tgcagtccagcggcctgtatagcctttcctctgtggtgactgtgccctcaagtagcctgggaacg | |
| | | NTKVDKKVEPKSCDKTHTCPPCP | | cagacatacatctgcaacgtgaaccacaagccctccaacaccaaggtggacaagaaggtcgagcc | |
| | | APELLGGPDVFLFPPKPKQTLMI | | caagtcctgcgacaagacccacacctgccccccctgccccgcccccgagctgctgggcggccccg | |
| | | SRTPEVTCVVVDVSDEDPEVKFN | | acgtgttcctgttcccccccaagcccaaggacaccctgatgatctccaggacccccgaggtgacc | |
| | | WYVDGVEVHNAKTKPREEQYNST | | tgcgtggtggtggacgtgtccgacgaggaccccgaggtgaagttcaactggtacgtggacggcgt | |
| | | YRVVSVLTVLHQDWLNGKEYKCA | | ggaggtgcacaacgccaagaccaagcccagggaggagcagtacaactccacctacagggtggtgt | |
| | | VSNKAYPAPEEKTISKAKGQPRE | | ccgtgctgaccgtgctgcaccaggactggctgaacggcaaggagtacaagtgcgccgtgtccaac | |
| | | PQVYTLPPSRDELTKNQVSLTCL | | aaggcctaccccgcccccgaggagaagaccatctccaaggccaagggccagcccagggagcccca | |
| | | VKGFYPSDIAVEWESNGQPENNY | | ggtgtacaccctgcccccctccagggacgagctgaccaagaaccaggtgtccctgacctgcctgg | |
| | | KTTPPVLDSDGSFFLYSKLTVDK | | tgaagggcttctacccctccgacatcgccgtggagtgggagtccaacggccagcccgagaacaac | |
| | | SRWQQGNVFSCSVMHEALHNHYT | | tacaagaccaccccccccgtgctggactccgacggctccttcttcctgtactccaagctgaccgt | |
| | | QKSLSLSPGK | | ggacaagtccaggtggcagcagggcaacgtgttctcctgctccgtgatgcacgaggccctgcaca | |
| | | | | accactacacccagaagtccctgtccctgtcccccggcaag | |
| | Light | DIQMTQSPSSLSASVGDRVTITC | 299 | gacattcagatgacccaatctccatcttccctgtctgcttcagtcggagatcgggtcactatcac | 300 |
| | Chain | RASQDISNYLNWYQQKPDGTVKL | | ctgtagagccagtcaggacataagcaactacctgaactggtatcagcagaaacccgatggtaccg | |
| | | LIYSTSRLHSGVPSRFSGSGSGT | | tgaaactcctgatctatagcactagcaggctgcattccggtgttccatccaggttttctggctcc | |
| | | DYTLTISSLQPEDFATYYCQQGS | | ggttcaggcacagactacacgctcactatcagttcactgcaacctgaggatttcgccacatacta | |
| | | TLPFTFGQGTKLEIKRTVAAPSV | | ctgccagcaaggctcaacactgccctttacctttgggcaaggcaccaagttggagattaagcgga | |
| | | FIFPPSDEQLKSGTASVVCLLNN | | cagtggctgcacctagtgtgttcatctttcctcccagcgatgagcagctgaaatccgggacagct | |
| | | FYPREAKVQWKVDNALQSGNSQE | | tctgtggtgtgcttgctgaacaacttctatccacgagaagctaaggtccagtggaaggtagacaa | |
| | | SVTEQDSKDSTYSLSSTLTLSKA | | tgcccttcagtccggcaattcccaggagagtgttaccgaacaggacagcaaggactctacttaca | |
| | | DYEKHKVYACEVTHQGLSSPVTK | | gcctgtctagcacgcttaccctgtccaaagccgattacgagaagcacaaagtgtatgcctgtgaa | |
| | | SFNRGEC | | gtgacacatcaggggcttagttcacccgtaaccaagagcttcaatcgtggagaatgc | |
| human- | Heavy | QVQLVQSGPEVKKPGASVKVVCK | 301 | caggtgcagctggttcagtccgggcctgaggtgaagaagcccggcgctagtgtgaaggtcgtctg | 302 |
| ized | Chain | TSGYTFTSYYIQWLKQRPGQGLE | | caaaacttcaggctataccttcacatcctattacatccagtggctgaagcaacgccctggacaag | |
| HM268- | | WIGWIYFGDASTKYNEKFKGRVT | | ggctcgaatggatcgggtggatctactttggggacgcttctaccaagtacaacgagaagtttaag | |
| K8- | | MTADKSTSTAYMELRSLRSDDTA | | ggacgagtgacaatgaccgccgacaagtccacaagcaccgcctacatggagctcagatccctcag | |
| X4-KS | | VYYCASYYGSYFDYWGQGTTVTV | | gagcgatgataccgcagtctactattgcgcctcttattacgggtcctacttcgactattggggtc | |
| | | SSASTKGPSVFPLAPSSKSTSGG | | agggaacaacggttacagtctcttccgcctccaccaaaggcccctctgtgtttccactggcacca | |
| | | TAALGCLVKDYFPEPVTVSWNSG | | agctcaaagtcaaccagtggtggaaccgctgctctgggctgtctggttaaggactatttccccga | |
| | | ALTSGVHTFPAVLQSSGLYSLSS | | acctgtaaccgtaagctggaatagtggcgcactgacctccggggtccacacatttcccgccgtgc | |
| | | VVTVPSSSLGTQTYICNVNHKPS | | tgcagagttcaggcctctattccctcagctccgtcgtgactgtcccctcctcttcccttggtact | |
| | | NTKVDKKVEPKSCDKTHTCPPCP | | cagacttacatctgcaacgtgaaccacaagccctccaacaccaaggtggacaagaaggtcgagcc | |
| | | APELLGGPDVFLFPPKPKDTLMI | | caagtcctgcgacaagacccacacctgccccccctgccccgcccccgagctgctgggcggccccg | |
| | | SRTPEVTGVVVDVGDEDPEVKFN | | acgtgttcctgttcccccccaagcccaaggacaccctgatgatctccaggacccccgaggtgacc | |
| | | WYVDGVEVHNAKTKPREEQYNST | | tgcgtggtggtggacgtgggcgacgaggaccccgaggtgaagttcaactggtacgtggacggcgt | |
| | | YRVVSVLTVLHQDWLNGKEYKCA | | ggaggtgcacaacgccaagaccaagcccagggaggagcagtacaactccacctacagggtggtgt | |
| | | VSNKAYPAPEEKTISKAKGQPRE | | ccgtgctgaccgtgctgcaccaggactggctgaacggcaaggagtacaagtgcgccgtgtccaac | |
| | | PQVYTLPPSRDELTKNQVSLTCL | | aaggccTACcccgcccccGAGgagaagaccatctccaaggccaagggccagcccagggagcccca | |
| | | VKGFYPSDIAVEWESNGQPENNY | | ggtgtacaccctgcccccctccagggacgagctgaccaagaaccaggtgtccctgacctgcctgg | |
| | | KTTPPVLDSDGSFFLYSKLTVDK | | tgaagggcttctacccctccgacatcgccgtggagtgggagtccaacggccagcccgagaacaac | |
| | | SRWQQGNVFSCSVMHEALHNHYT | | tacaagaccaccccccccgtgctggactccgacggctccttcttcctgtactccaagctgaccgt | |
| | | QKSLSLSPGK | | ggacaagtccaggtggcagcagggcaacgtgttctcctgctccgtgatgcacgaggccctgcaca | |
| | | | | accactacacccagaagtccctgtccctgtcccccggcaag | |
| | Light | DIQMTQSPSSLSASVGDRVTITC | 303 | gacattcagatgacccaatctccatcttccctgtctgcttcagtcggagatcgggtcactatcac | 304 |
| | Chain | RASQDISNYLNWYQQKPDGTVKL | | ctgtagagccagtcaggacataagcaactacctgaactggtatcagcagaaacccgatggtaccg | |
| | | LIYSTSRLHSGVPSRFSGSGSGT | | tgaaactcctgatctatagcactagcaggctgcattccggtgttccatccaggttttctggctcc | |
| | | DYTLTISSLQPEDFATYYCQQGS | | ggttcaggcacagactacacgctcactatcagttcactgcaacctgaggatttcgccacatacta | |
| | | TLPFTFGQGTKLEIKRTVAAPSV | | ctgccagcaaggctcaacactgccctttacctttgggcaaggcaccaagttggagattaagcgga | |
| | | FIFPPSDEQLKSGTASVVCLLNN | | cagtggctgcacctagtgtgttcatctttcctcccagcgatgagcagctgaaatccgggacagct | |
| | | FYPREAKVQWKVDNALQSGNSQE | | tctgtggtgtgcttgctgaacaacttctatccacgagaagctaaggtccagtggaaggtagacaa | |
| | | SVTEQDSKDSTYSLSSTLTLSKA | | tgcccttcagtccggcaattcccaggagagtgttaccgaacaggacagcaaggactctacttaca | |
| | | DYEKHKVYACEVTHQGLSSPVTK | | gcctgtctagcacgcttaccctgtccasagccgattacgagaagcacaaagtgtatgcctgtgaa | |
| | | SFNRGEC | | gtgacacatcaggggcttagttcacccgtaaccaagagcttcaatcgtggagaatgc | |
| human- | Heavy | QVQLVQSGPEVKKPGASVKIPCK | 305 | caggttcagctggtccaatccgggcccgaggttaagaagcccggagctagcgtcaagataccctg | 306 |
| ized | Chain | ASGYTFTDYNVDWVRQVPGQGLE | | caaagctagtggctataccttcacagactacaatgtagactgggttcggcaagtacccggtcagg | |
| HM297- | | WMGDIDPNNGGTIYNQKFKDRVT | | gcttggagtggatgggagatatcgaccccaataatggagggactatctacaaccagaaattcaag | |
| H5- | | MTVDKSTRTAYMELRSLRSDDTA | | gatcgtgtcacaatgacggtggacaagagtacaaggaccgcctacatggagctgcgaagcttgcg | |
| X2-K | | VYYCARWRGAMDYWGQGTLVTVS | | ctctgacgatacagccgtctactactgtgctaggtggagaggtgccatggactattggggccagg | |
| | | SASTKGPSVFPLAPSSKSTSGGT | | gcaccctggtaaccgtgtcatctgcctctaccaaaggtcccagcgtgtttcctctcgccccatca | |
| | | AALGCLVKDYFPEPVTVSWNSGA | | agcaagagcacatcaggtgggactgctgcactggggtgtttggtcaaggattacttccctgagcc | |
| | | LTSGVHTFPAVLQSSGLYSLSSV | | agtgacggtatcatggaactccggagcccttaccagcggagtgcatacttttcccgctgtgctgc | |
| | | VTVPSSSLGTQTYICNVNHKPSN | | aatcctccggcttgtatagcctttcttctgtggtcactgtgccttcttcctcactgggcacccag | |
| | | TKVDKKVEPKSCDKTHTCPPGPA | | acctacatctgcaacgtgaaccacaagccctccaacaccaaggtggacaagaaggtcgagcccaa | |
| | | PELLDGPSVFLFPPKPKDTLMIS | | gtcctgcgacaagacccacacctgccccccctgccccgcccccgagctgctggacggcccctccg | |
| | | RTPEVTCVVVDVSDEDPEVKFNW | | tgttcctgttcccccccaagcccaaggacaccctgatgatctccaggacccccgaggtgacctgc | |
| | | YVDGVEVHNAKTKPREEQYNSTY | | gtggtggtggacgtgtccgacgaggaccccgaggtgaagttcaactggtacgtggacggcgtgga | |
| | | RVVSVLTVLHQDWLNGKEYKCAV | | ggtgcacaacgccaagaccaagcccagggaggagcagtacaactccacctacagggtggtgtccg | |
| | | SNKALPAPIEKTISKAKGQPREP | | tgctgaccgtgctgcaccaggactggctgaacggcaaggagtacaagtgcgccgtgtccaacaag | |
| | | QVYTLPPSRDELTKNQVSLTCLV | | gccctgcccgcccccatcgagaagaccatctccaaggccaagggccagcccagggagccccaggt | |
| | | KGFYPSDIAVEWESNGQPENNYK | | gtacaccctgcccccctccagggacgagctgaccaagaaccaggtgtccctgacctgcctggtga | |
| | | TTPPVLDSDGSFFLYSKLTVDKS | | agggcttctacccctccgacatcgccgtggagtgggagtccaacggccagcccgagaacaactac | |
| | | RWQQGNVFSCSVMHEALHNHYTQ | | aagaccaccccccccgtgctggactccgacggctccttcttcctgtactccaagctgaccgtgga | |
| | | KSLSLSPGK | | caagtccaggtggcagcagggcaacgtgttctcctgctccgtgatgcacgaggccctgcacaacc | |
| | | | | actacacccagaagtccctgtccctgtcccccggcaag | |
| | Light | DIQMTQSPSSLSASVGDRVTITC | 307 | gacatccagatgacccagtcaccatcctctctgtccgcaagtgtgggtgatagggtgacgattac | 308 |
| | Chain | RASQDIDNYLKWYQQKPDGTVKL | | ctgtcgtgcctcacaagacatcgacaactacctcaagtggtaccagcagaaacccgatggaaccg | |
| | | LIYDTSRLHSGVPSRFSGSGSGT | | ttaaactgctgatctacgatacctcacgccttcattctggcgtaccaagccggttttctggctct | |
| | | DYTLTISSLKQEDFATYYCQQGY | | ggcagtggcactgactacacacttaccatttcctccttgaaacaggaggattttgccacctacta | |
| | | TLPWTFGQGTKLEIKRTVAAPSV | | ttgccagcaagggtacacactgccttggacttttgggcaaggaacgaagttggagataaagcgga | |
| | | FIFPPSDEQLKSGTASVVCLLNN | | ctgttgctgctcctagcgtgttcatcttcccacccagtgacgaacagctcaagagcggtactgct | |
| | | FYPREAKVQWKVDNALQSGNSQE | | agcgtggtctgcttgctgaacaacttctatcccagagaggctaaagtgcagtggaaggtcgataa | |
| | | SVTEQDSKDSTYSLSSTLTLSKA | | tgccctccagtctgggaatagccaggaatccgtgactgaacaggactccaaggacagtacctata | |
| | | DYEKHKVYACEVTHQGLSSPVTK | | gcctgtctagcacactgacactgtcaaaagccgattatgagaagcacaaggtctatgcctgtgag | |
| | | SFNRGEC | | gtaacacaccaaggcctttcctctcctgtgacaaagagtttcaatcgaggagaatgc | |
| human- | Heavy | QVQLVQSGPEVKKPGASVKIPCK | 309 | caggttcagctggtccaatccgggcccgaggttaagaagcccggagctagcgtcaagataccctg | 310 |
| ized | Chain | ASGYTFTDYNVDWVRQVPGQGLE | | caaagctagtggctataccttcacagactacaatgtagactgggttcggcaagtacccggtcagg | |
| HM297- | | WMGDIDPNNGGTIYNQKFKDRVT | | gcttggagtggatgggagatatcgaccccaataatggagggactatctacaaccagaaattcaag | |
| H5- | | MTVDKSTRTAYMELRSLRSDDTA | | gatcgtgtcacaatgacggtggacaagagtacaaggaccgcctacatggagctgcgaagcttgcg | |
| X3-KS | | VYYCARWRGAMDYWGQGTLVTVS | | ctctgacgatacagccgtctactactgtgctaggtggagaggtgccatggactattggggccagg | |
| | | SASTKGPSVFPLAPSSKSTSGGT | | gcaccctggtaaccgtgtcatctgcctctaccaaaggtcccagcgtgtttcctctcgccccatca | |
| | | AALGCLVKDYFPEPVTVSWNSGA | | agcaagagcacatcaggtgggactgctgcactggggtgtttggtcaaggattacttccctgagcc | |
| | | LTSGVHTFPAVLQSSGLYSLSSV | | agtgacggtatcatggaactccggagcccttaccagcggagtgcatacttttcccgctgtgctgc | |
| | | VTVPSSSLGTQTYIGNVNHKPSN | | aatcctccggcttgtatagcctttcttctgtggtcactgtgccttcttcctcactgggcacccag | |
| | | TKVDKKVEPKSCDKTHTCPPCPA | | acctacatctgcaacgtgaaccacaagccctccaacaccaaggtggacaagaaggtcgagcccaa | |
| | | PELLGGPDVFLFPPKPKDTLMIS | | gtcctgcgacaagacccacacctgccccccctgccccgcccccgagctgctgggcggccccgacg | |
| | | RTPEVTCVVVDVGDEDPEVKFNW | | tgttcctgttcccccccaagcccaaggacaccctgatgatctccaggacccccgaggtgacctgc | |
| | | YVDGVEVHNAKTKPREEQYNSTY | | gtggtggtggacgtgggcgacgaggaccccgaggtgaagttcaactggtacgtggacggcgtgga | |
| | | RVVSVLTVLHQDWLNGKEYKCAV | | ggtgcacaacgccaagaccaagcccagggaggagcagtacaactccacctacagggtggtgtccg | |
| | | SNKALPAPIEKTISKAKGQPREP | | tgctgaccgtgctgcaccaggactggctgaacggcaaggagtacaagtgcgccgtgtccaacaag | |
| | | QVYTLPPSRDELTKNQVSLTQLV | | gccctgcccgcccccatcgagaagaccatctccaaggccaagggccagcccagggagccccaggt | |
| | | KGFYPSDIAVEWESNGQPENNYK | | gtacaccctgcccccctccagggacgagctgaccaagaaccaggtgtccctgacctgcctggtga | |
| | | TTPPVLDSDGSFFLYSKLTVDKS | | agggcttctacccctccgacatcgccgtggagtgggagtccaacggccagcccgagaacaactac | |
| | | RWQQGNVFSCSVMHEALHNHYTQ | | aagaccaccccccccgtgctggactccgacggctccttcttcctgtactccaagctgaccgtgga | |
| | | KSLSLSPGK | | caagtccaggtggcagcagggcaacgtgttctcctgctccgtgatgcacgaggccctgcacaacc | |
| | | | | actacacccagaagtccctgtccctgtcccccggcaag | |
| | Light | DIQMTQSPSSLSASVGDRVTITC | 311 | gacatccagatgacccagtcaccatcctctctgtccgcaagtgtgggtgatagggtgacgattac | 312 |
| | Chain | RASQDIDNYLKWYQQKPDGTVKL | | ctgtcgtgcctcacaagacatcgacaactacctcaagtggtaccagcagaaacccgatggaaccg | |
| | | LIYDTSRLHSGVPSRFSGSGSGT | | ttaaactgctgatctacgatacctcacgccttcattctggcgtaccaagccggttttctggctct | |
| | | DYTLTISSLKQEDFATYYCQQGY | | ggcagtggcactgactacacacttaccatttcctccttgaaacaggaggattttgccacctacta | |
| | | TLPWTFGQGTKLEIKRTVAAPSV | | ttgccagcaagggtacacactgccttggacttttgggcaaggaacgaagttggagataaagcgga | |
| | | FIFPPSDEQLKSGTASVVQLLNN | | ctgttgctgctcctagcgtgttcatcttcccacccagtgacgaacagctcaagagcggtactgct | |
| | | FYPREAKVQWKVDNALQSGNSQE | | agcgtggtctgcttgctgaacaacttctatcccagagaggctaaagtgcagtggaaggtcgataa | |
| | | SVTEQDSKDSTYSLSSTLTLSKA | | tgccctccagtctgggaatagccaggaatccgtgactgaacaggactccaaggacagtacctata | |
| | | DYEKHKVYACEVTHQGLSSPVTK | | gcctgtctagcacactgacactgtcaaaagccgattatgagaagcacaaggtctatgcctgtgag | |
| | | SFNRGEC | | gtaacacaccaaggcctttcctctcctgtgacaaagagtttcaatcgaggagaatgc | |
| human- | Heavy | QVQLVQSGPEVKKPGASVKIPCK | 313 | caggttcagctggtccaatccgggcccgaggttaagaagcccggagctagcgtcaagataccctg | 314 |
| ized | Chain | ASGYTFTDYNVDWVRQVPGQGLE | | caaagctagtggctataccttcacagactacaatgtagactgggttcggcaagtacccggtcagg | |
| HM297- | | WMGDIDPNNGGTIYNQKFKDRVT | | gcttggagtggatgggagatatcgaccccaataatggagggactatctacaaccagaaattcaag | |
| H5- | | MTVDKSTRTAYMELRSLRSDDTA | | gatcgtgtcacaatgacggtggacaagagtacaaggaccgcctacatggagctgcgaagcttgcg | |
| X4-K | | VYYCARWRGAMDYWGQGTLVTVS | | ctctgacgatacagccgtctactactgtgctaggtggagaggtgccatggactattggggccagg | |
| | | SASTKGPSVFPLAPSSKSTSGGT | | gcaccctggtaaccgtgtcatctgcctctaccaaaggtcccagcgtgtttcctctcgccccatca | |
| | | AALGCLVKDYFPEPVTVSWNSGA | | agcaagagcacatcaggtgggactgctgcactggggtgtttggtcaaggattacttccctgagcc | |
| | | LTSGVHTFPAVLQSSGLYSLSSV | | agtgacggtatcatggaactccggagcccttaccagcggagtgcatacttttcccgctgtgctgc | |
| | | VTVPSSSLGTQTYICNVNHKPSN | | aatcctccggcttgtatagcctttcttctgtggtcactgtgccttcttcctcactgggcacccag | |
| | | TKVDKKVEPKSCDKTHTCPPGPA | | acctacatctgcaacgtgaaccacaagccctccaacaccaaggtggacaagaaggtcgagcccaa | |
| | | PELLGGPDVFLFPPKPKDTLMIS | | gtcctgcgacaagacccacacctgccccccctgccccgcccccgagctgctgggcggccccgacg | |
| | | RTPEVTCVVVDVSDEDPEVKFNW | | tgttcctgttcccccccaagcccaaggacaccctgatgatctccaggacccccgaggtgacctgc | |
| | | YVDGVEVHNAKTKPREEQYNSTY | | gtggtggtggacgtgtccgacgaggaccccgaggtgaagttcaactggtacgtggacggcgtgga | |
| | | RVVSVLTVLHQDWLNGKEYKCAV | | ggtgcacaacgccaagaccaagcccagggaggagcagtacaactccacctacagggtggtgtccg | |
| | | SNKAYPAPEEKTISKAKGQPREP | | tgctgaccgtgctgcaccaggactggctgaacggcaaggagtacaagtgcgccgtgtccaacaag | |
| | | QVYTLPPSRDELTKNQVSLTCLV | | gcctaccccgcccccgaggagaagaccatctccaaggccaagggccagcccagggagccccaggt | |
| | | KGFYPSDIAVEWESNGQPENNYK | | gtacaccctgcccccctccagggacgagctgaccaagaaccaggtgtccctgacctgcctggtga | |
| | | TTPPVLDSDGSFFLYSKLTVDKS | | agggcttctacccctccgacatcgccgtggagtgggagtccaacggccagcccgagaacaactac | |
| | | RWQQGNVFSCSVMHEALHNHYTQ | | aagaccaccccccccgtgctggactccgacggctccttcttcctgtactccaagctgaccgtgga | |
| | | KSLSLSPGK | | caagtccaggtggcagcagggcaacgtgttctcctgctccgtgatgcacgaggccctgcacaacc | |
| | | | | actacacccagaagtccctgtccctgtcccccggcaag | |
| | Light | DIQMTQSPSSLSASVGDRVTITC | 315 | gacatccagatgacccagtcaccatcctctctgtccgcaagtgtgggtgatagggtgacgattac | 316 |
| | Chain | RASQDIDNYLKWYQQKPDGTVKL | | ctgtcgtgcctcacaagacatcgacaactacctcaagtggtaccagcagaaacccgatggaaccg | |
| | | LIYDTSRLHSGVPSRFSGSGSGT | | ttaaactgctgatctacgatacctcacgccttcattctggcgtaccaagccggttttctggctct | |
| | | DYTLTISSLKQEDFATYYCQQGY | | ggcagtggcactgactacacacttaccatttcctccttgaaacaggaggattttgccacctacta | |
| | | TLPWTFGQGTKLEIKRTVAAPSV | | ttgccagcaagggtacacactgccttggacttttgggcaaggaacgaagttggagataaagcgga | |
| | | FIFPPSDEQLKSGTASVVCLLNN | | ctgttgctgctcctagcgtgttcatcttcccacccagtgacgaacagctcaagagcggtactgct | |
| | | FYPREAKVQWKVDNALQSGNSQE | | agcgtggtctgcttgctgaacaacttctatcccagagaggctaaagtgcagtggaaggtcgataa | |
| | | SVTEQDSKDSTYSLSSTLTLSKA | | tgccctccagtctgggaatagccaggaatccgtgactgaacaggactccaaggacagtacctata | |
| | | DYEKHKVYACEVTHQGLSSPVTK | | gcctgtctagcacactgacactgtcaaaagccgattatgagaagcacaaggtctatgcctgtgag | |
| | | SFNRGEC | | gtaacacaccaaggcctttcctctcctgtgacaaagagtttcaatcgaggagaatgc | |
| human- | Heavy | QVQLVQSGPEVKKPGASVKIPCK | 317 | caggttcagctggtccaatccgggcccgaggttaagaagcccggagctagcgtcaagataccctg | 318 |
| ized | Chain | ASGYTFTDYNVDWVRQVPGQGLE | | caaagctagtggctataccttcacagactacaatgtagactgggttcggcaagtacccggtcagg | |
| HM297- | | WMGDIDPNNGGTIYNQKFKDRVT | | gcttggagtggatgggagatatcgaccccaataatggagggactatctacaaccagaaattcaag | |
| H5- | | MTVDKSTRTAYMELRSLRSDDTA | | gatcgtgtcacaatgacggtggacaagagtacaaggaccgcctacatggagctgcgaagcttgcg | |
| X3-K | | VYYCARWRGAMDYWGQGTLVTVS | | ctctgacgatacagccgtctactactgtgctaggtggagaggtgccatggactattggggccagg | |
| | | SASTKGPSVFPLAPSSKSTSGGT | | gcaccctggtaaccgtgtcatctgcctccaccaaaggcccctctgtgtttccactggcaccaagc | |
| | | AALGCLVKDYFPEPVTVSWNSGA | | tcaaagtcaaccagtggtggaaccgctgctctgggctgtctggttaaggactatttccccgaacc | |
| | | LTSGVHTFPAVLQSSGLYSLSSV | | tgtaaccgtaagctggaatagtggcgcactgacctccggggtccacacatttcccgccgtgctgc | |
| | | VTVPSSSLGTQTYIGNVNHKPSN | | agagttcaggcctctattccctcagctccgtcgtgactgtcccctcctcttcccttggtactcag | |
| | | TKVDKKVEPKSCDKTHTCPPCPA | | acttacatctgcaacgtgaaccacaagccctccaacaccaaggtggacaagaaggtcgagcccaa | |
| | | PELLGGPDVFLFPPKPKDTLMIS | | gtcctgcgacaagacccacacctgccccccctgccccgcccccgagctgctgggcggccccgacg | |
| | | RTPEVTCVVVDVSDEDPEVKFNW | | tgttcctgttcccccccaagcccaaggacaccctgatgatctccaggacccccgaggtgacctgc | |
| | | YVDGVEVHNAKTKPREEQYNSTY | | gtggtggtggacgtgagtgacgaggaccccgaggtgaagttcaactggtacgtggacggcgtgga | |
| | | RVVSVLTVLHQDWLNGKEYKCAV | | ggtgcacaacgccaagaccaagcccagggaggagcagtacaactccacctacagggtggtgtccg | |
| | | SNKALPAPIEKTISKAKGQPREP | | tgctgaccgtgctgcaccaggactggctgaacggcaaggagtacaagtgcgccgtgtccaacaag | |
| | | QVYTLPPSRDELTKNQVSLTQLV | | gccctgcccgcccccatcgagaagaccatctccaaggccaagggccagcccagggagccccaggt | |
| | | KGFYPSDIAVEWESNGQPENNYK | | gtacaccctgcccccctccagggacgagctgaccaagaaccaggtgtccctgacctgcctggtga | |
| | | TTPPVLDSDGSFFLYSKLTVDKS | | agggcttctacccctccgacatcgccgtggagtgggagtccaacggccagcccgagaacaactac | |
| | | RWQQGNVFSCSVMHEALHNHYTQ | | aagaccaccccccccgtgctggactccgacggctccttcttcctgtactccaagctgaccgtgga | |
| | | KSLSLSPGK | | caagtccaggtggcagcagggcaacgtgttctcctgctccgtgatgcacgaggccctgcacaacc | |
| | | | | actacacccagaagtccctgtccctgtcccccggcaag | |
| | Light | DIQMTQSPSSLSASVGDRVTITC | 319 | gacatccagatgacccagtcaccatcctctctgtccgcaagtgtgggtgatagggtgacgattac | 320 |
| | Chain | RASQDIDNYLKWYQQKPDGTVKL | | ctgtcgtgcctcacaagacatcgacaactacctcaagtggtaccagcagaaacccgatggaaccg | |
| | | LIYDTSRLHSGVPSRFSGSGSGT | | ttaaactgctgatctacgatacctcacgccttcattctggcgtaccaagccggttttctggctct | |
| | | DYTLTISSLKQEDFATYYCQQGY | | ggcagtggcactgactacacacttaccatttcctccttgaaacaggaggattttgccacctacta | |
| | | TLPWTFGQGTKLEIKRTVAAPSV | | ttgccagcaagggtacacactgccttggacttttgggcaaggaacgaagttggagataaagcgga | |
| | | FIFPPSDEQLKSGTASVVCLLNN | | ctgttgctgctcctagcgtgttcatcttcccacccagtgacgaacagctcaagagcggtactgct | |
| | | FYPREAKVQWKVDNALQSGNSQE | | agcgtggtctgcttgctgaacaacttctatcccagagaggctaaagtgcagtggaaggtcgataa | |
| | | SVTEQDSKDSTYSLSSTLTLSKA | | tgccctccagtctgggaatagccaggaatccgtgactgaacaggactccaaggacagtacctata | |
| | | DYEKHKVYACEVTHQGLSSPVTK | | gcctgtctagcacactgacactgtcaaaagccgattatgagaagcacaaggtctatgcctgtgag | |
| | | SFNRGEC | | gtaacacaccaaggcctttcctctcctgtgacaaagagtttcaatcgaggagaatgc | |
| human- | Heavy | QVQLVQSGPEVKKPGASVKIPCK | 321 | caggttcagctggtccaatccgggcccgaggttaagaagcccggagctagcgtcaagataccctg | 322 |
| ized | Chain | ASGYTFTDYNVDWVRQVPGQGLE | | caaagctagtggctataccttcacagactacaatgtagactgggttcggcaagtacccggtcagg | |
| HM297- | | WMGDIDPNNGGTIYNQKFKDRVT | | gcttggagtggatgggagatatcgaccccaataatggagggactatctacaaccagaaattcaag | |
| H5-X3- | | MTVDKSTRTAYMELRSLRSDDTA | | gatcgtgtcacaatgacggtggacaagagtacaaggaccgcctacatggagctgcgaagcttgcg | |
| KSL | | VYYCARWRGAMDYWGQGTLVTVS | | ctctgacgatacagccgtctactactgtgctaggtggagaggtgccatggactattggggccagg | |
| | | SASTKGPSVFPLAPSSKSTSGGT | | gcaccctggtaaccgtgtcatctgcctccaccaaaggcccctctgtgtttccactggcaccaagc | |
| | | AALGCLVKDYFPEPVTVSWNSGA | | tcaaagtcaaccagtggtggaaccgctgctctgggctgtctggttaaggactatttccccgaacc | |
| | | LTSGVHTFPAVLQSSGLYSLSSV | | tgtaaccgtaagctggaatagtggcgcactgacctccggggtccacacatttcccgccgtgctgc | |
| | | VTVPSSSLGTQTYICNVNHKPSN | | agagttcaggcctctattccctcagctccgtcgtgactgtcccctcctcttcccttggtactcag | |
| | | TKVDKKVEPKSCDKTHTCPPGPA | | acttacatctgcaacgtgaaccacaagccctccaacaccaaggtggacaagaaggtcgagcccaa | |
| | | PELLGGPDVFLFPPKPKDTLMIS | | gtcctgcgacaagacccacacctgccccccctgccccgcccccgagctgctgggcggccccgacg | |
| | | RTPEVTCVVVDVGDEDPEVKFNW | | tgttcctgttcccccccaagcccaaggacaccctgatgatctccaggacccccgaggtgacctgc | |
| | | YVDGVEVHNAKTKPREEQYNSTY | | gtggtggtggacgtgGGCgacgaggaccccgaggtgaagttcaactggtacgtggacggcgtgga | |
| | | RVVSVLTVLHQDWLNGKEYKCAV | | ggtgcacaacgccaagaccaagcccagggaggagcagtacaactccacctacagggtggtgtccg | |
| | | SNKAYPAPIEKTISKAKGQPREP | | tgctgaccgtgctgcaccaggactggctgaacggcaaggagtacaagtgcgccgtgtccaacaag | |
| | | QVYTLPPSRDELTKNQVSLTCLV | | gccTACcccgcccccatcgagaagaccatctccaaggccaagggccagcccagggagccccaggt | |
| | | KGFYPSDIAVEWESNGQPENNYK | | gtacaccctgcccccctccagggacgagctgaccaagaaccaggtgtccctgacctgcctggtga | |
| | | TTPPVLDSDGSFFLYSKLTVDKS | | agggcttctacccctccgacatcgccgtggagtgggagtccaacggccagcccgagaacaactac | |
| | | RWQQGNVFSCSVMHEALHNHYTQ | | aagaccaccccccccgtgctggactccgacggctccttcttcctgtactccaagctgaccgtgga | |
| | | KSLSLSPGK | | caagtccaggtggcagcagggcaacgtgttctcctgctccgtgatgcacgaggccctgcacaacc | |
| | | | | actacacccagaagtccctgtccctgtcccccggcaag | |
| | Light | DIQMTQSPSSLSASVGDRVTITC | 323 | gacatccagatgacccagtcaccatcctctctgtccgcaagtgtgggtgatagggtgacgattac | 324 |
| | Chain | RASQDIDNYLKWYQQKPDGTVKL | | ctgtcgtgcctcacaagacatcgacaactacctcaagtggtaccagcagaaacccgatggaaccg | |
| | | LIYDTSRLHSGVPSRFSGSGSGT | | ttaaactgctgatctacgatacctcacgccttcattctggcgtaccaagccggttttctggctct | |
| | | DYTLTISSLKQEDFATYYCQQGY | | ggcagtggcactgactacacacttaccatttcctccttgaaacaggaggattttgccacctacta | |
| | | TLPWTFGQGTKLEIKRTVAAPSV | | ttgccagcaagggtacacactgccttggacttttgggcaaggaacgaagttggagataaagcgga | |
| | | FIFPPSDEQLKSGTASVVCLLNN | | ctgttgctgctcctagcgtgttcatcttcccacccagtgacgaacagctcaagagcggtactgct | |
| | | FYPREAKVQWKVDNALQSGNSQE | | agcgtggtctgcttgctgaacaacttctatcccagagaggctaaagtgcagtggaaggtcgataa | |
| | | SVTEQDSKDSTYSLSSTLTLSKA | | tgccctccagtctgggaatagccaggaatccgtgactgaacaggactccaaggacagtacctata | |
| | | DYEKHKVYACEVTHQGLSSPVTK | | gcctgtctagcacactgacactgtcaaaagccgattatgagaagcacaaggtctatgcctgtgag | |
| | | SFNRGEC | | gtaacacaccaaggcctttcctctcctgtgacaaagagtttcaatcgaggagaatgc | |
| human- | Heavy | QVQLVQSGPEVKKPGASVKIPCK | 325 | caggttcagctggtccaatccgggcccgaggttaagaagcccggagctagcgtcaagataccctg | 326 |
| ized | Chain | ASGYTFTDYNVDWVRQVPGQGLE | | caaagctagtggctataccttcacagactacaatgtagactgggttcggcaagtacccggtcagg | |
| HM297- | | WMGDIDPNNGGTIYNQKFKDRVT | | gcttggagtggatgggagatatcgaccccaataatggagggactatctacaaccagaaattcaag | |
| H5-X3- | | MTVDKSTRTAYMELRSLRSDDTA | | gatcgtgtcacaatgacggtggacaagagtacaaggaccgcctacatggagctgcgaagcttgcg | |
| KSI | | VYYCARWRGAMDYWGQGTLVTVS | | ctctgacgatacagccgtctactactgtgctaggtggagaggtgccatggactattggggccagg | |
| | | SASTKGPSVFPLAPSSKSTSGGT | | gcaccctggtaaccgtgtcatctgcctccaccaaaggcccctctgtgtttccactggcaccaagc | |
| | | AALGCLVKDYFPEPVTVSWNSGA | | tcasagtcaaccagtggtggaaccgctgctctgggctgtctggttaaggactatttccccgaacc | |
| | | LTSGVHTFPAVLQSSGLYSLSSV | | tgtaaccgtaagctggaatagtggcgcactgacctccggggtccacacatttcccgccgtgctgc | |
| | | VTVPSSSLGTQTYIGNVNHKPSN | | agagttcaggcctctattccctcagctccgtcgtgactgtcccctcctcttcccttggtactcag | |
| | | TKVDKKVEPKSCDKTHTCPPCPA | | acttacatctgcaacgtgaaccacaagccctccaacaccaaggtggacaagaaggtcgagcccaa | |
| | | PELLGGPDVFLFPPKPKDTLMIS | | gtcctgcgacaagacccacacctgccccccctgccccgcccccgagctgctgggcggccccgacg | |
| | | RTPEVTCVVVDVGDEDPEVKFNW | | tgttcctgttcccccccaagcccaaggacaccctgatgatctccaggacccccgaggtgacctgc | |
| | | YVDGVEVHNAKTKPREEQYNSTY | | gtggtggtggacgtgGGCgacgaggaccccgaggtgaagttcaactggtacgtggacggcgtgga | |
| | | RVVSVLTVLHQDWLNGKEYKCAV | | ggtgcacaacgccaagaccaagcccagggaggagcagtacaactccacctacagggtggtgtccg | |
| | | SNKALPAPEEKTISKAKGQPREP | | tgctgaccgtgctgcaccaggactggctgaacggcaaggagtacaagtgcgccgtgtccaacaag | |
| | | QVYTLPPSRDELTKNQVSLTQLV | | gccctgcccgcccccGAGgagaagaccatctccaaggccaagggccagcccagggagccccaggt | |
| | | KGFYPSDIAVEWESNGQPENNYK | | gtacaccctgcccccctccagggacgagctgaccaagaaccaggtgtccctgacctgcctggtga | |
| | | TTPPVLDSDGSFFLYSKLTVDKS | | agggcttctacccctccgacatcgccgtggagtgggagtccaacggccagcccgagaacaactac | |
| | | RWQQGNVFSCSVMHEALHNHYTQ | | aagaccaccccccccgtgctggactccgacggctccttcttcctgtactccaagctgaccgtgga | |
| | | KSLSLSPGK | | caagtccaggtggcagcagggcaacgtgttctcctgctccgtgatgcacgaggccctgcacaacc | |
| | | | | actacacccagaagtccctgtccctgtcccccggcaag | |
| | Light | DIQMTQSPSSLSASVGDRVTITC | 327 | gacatccagatgacccagtcaccatcctctctgtccgcaagtgtgggtgatagggtgacgattac | 328 |
| | Chain | RASQDIDNYLKWYQQKPDGTVKL | | ctgtcgtgcctcacaagacatcgacaactacctcaagtggtaccagcagaaacccgatggaaccg | |
| | | LIYDTSRLHSGVPSRFSGSGSGT | | ttaaactgctgatctacgatacctcacgccttcattctggcgtaccaagccggttttctggctct | |
| | | DYTLTISSLKQEDFATYYCQQGY | | ggcagtggcactgactacacacttaccatttcctccttgaaacaggaggattttgccacctacta | |
| | | TLPWTFGQGTKLEIKRTVAAPSV | | ttgccagcaagggtacacactgccttggacttttgggcaaggaacgaagttggagataaagcgga | |
| | | FIFPPSDEQLKSGTASVVCLLNN | | ctgttgctgctcctagcgtgttcatcttcccacccagtgacgaacagctcaagagcggtactgct | |
| | | FYPREAKVQWKVDNALQSGNSQE | | agcgtggtctgcttgctgaacaacttctatcccagagaggctaaagtgcagtggaaggtcgataa | |
| | | SVTEQDSKDSTYSLSSTLTLSKA | | tgccctccagtctgggaatagccaggaatccgtgactgaacaggactccaaggacagtacctata | |
| | | DYEKHKVYACEVTHQGLSSPVTK | | gcctgtctagcacactgacactgtcaaaagccgattatgagaagcacaaggtctatgcctgtgag | |
| | | SFNRGEC | | gtaacacaccaaggcctttcctctcctgtgacaaagagtttcaatcgaggagaatgc | |
| human- | Heavy | QVQLVQSGPEVKKPGASVKIPCK | 329 | caggttcagctggtccaatccgggcccgaggttaagaagcccggagctagcgtcaagataccctg | 330 |
| ized | Chain | ASGYTFTDYNVDWVRQVPGQGLE | | caaagctagtggctataccttcacagactacaatgtagactgggttcggcaagtacccggtcagg | |
| HM297- | | WMGDIDPNNGGTIYNQKFKDRVT | | gcttggagtggatgggagatatcgaccccaataatggagggactatctacaaccagaaattcaag | |
| H5- | | MTVDKSTRTAYMELRSLRSDDTA | | gatcgtgtcacaatgacggtggacaagagtacaaggaccgcctacatggagctgcgaagcttgcg | |
| X3-KL | | VYYCARWRGAMDYWGQGTLVTVS | | ctctgacgatacagccgtctactactgtgctaggtggagaggtgccatggactattggggccagg | |
| | | SASTKGPSVFPLAPSSKSTSGGT | | gcaccctggtaaccgtgtcatctgcctccaccaaaggcccctctgtgtttccactggcaccaagc | |
| | | AALGCLVKDYFPEPVTVSWNSGA | | tcaaagtcaaccagtggtggaaccgctgctctgggctgtctggttaaggactatttccccgaacc | |
| | | LTSGVHTFPAVLQSSGLYSLSSV | | tgtaaccgtaagctggaatagtggcgcactgacctccggggtccacacatttcccgccgtgctgc | |
| | | VTVPSSSLGTQTYICNVNHKPSN | | agagttcaggcctctattccctcagctccgtcgtgactgtcccctcctcttcccttggtactcag | |
| | | TKVDKKVEPKSCDKTHTCPPGPA | | acttacatctgcaacgtgaaccacaagccctccaacaccaaggtggacaagaaggtcgagcccaa | |
| | | PELLGGPDVFLFPPKPKDTLMIS | | gtcctgcgacaagacccacacctgccccccctgccccgcccccgagctgctgggcggccccgacg | |
| | | RTPEVTCVVVDVSDEDPEVKFNW | | tgttcctgttcccccccaagcccaaggacaccctgatgatctccaggacccccgaggtgacctgc | |
| | | YVDGVEVHNAKTKPREEQYNSTY | | gtggtggtggacgtgTCCgacgaggaccccgaggtgaagttcaactggtacgtggacggcgtgga | |
| | | RVVSVLTVLHQDWLNGKEYKCAV | | ggtgcacaacgccaagaccaagcccagggaggagcagtacaactccacctacagggtggtgtccg | |
| | | SNKAYPAPIEKTISKAKGQPREP | | tgctgaccgtgctgcaccaggactggctgaacggcaaggagtacaagtgcgccgtgtccaacaag | |
| | | QVYTLPPSRDELTKNQVSLTCLV | | gccTACcccgcccccatcgagaagaccatctccaaggccaagggccagcccagggagccccaggt | |
| | | KGFYPSDIAVEWESNGQPENNYK | | gtacaccctgcccccctccagggacgagctgaccaagaaccaggtgtccctgacctgcctggtga | |
| | | TTPPVLDSDGSFFLYSKLTVDKS | | agggcttctacccctccgacatcgccgtggagtgggagtccaacggccagcccgagaacaactac | |
| | | RWQQGNVFSCSVMHEALHNHYTQ | | aagaccaccccccccgtgctggactccgacggctccttcttcctgtactccaagctgaccgtgga | |
| | | KSLSLSPGK | | caagtccaggtggcagcagggcaacgtgttctcctgctccgtgatgcacgaggccctgcacaacc | |
| | | | | actacacccagaagtccctgtccctgtcccccggcaag | |
| | Light | DIQMTQSPSSLSASVGDRVTITC | 331 | gacatccagatgacccagtcaccatcctctctgtccgcaagtgtgggtgatagggtgacgattac | 332 |
| | Chain | RASQDIDNYLKWYQQKPDGTVKL | | ctgtcgtgcctcacaagacatcgacaactacctcaagtggtaccagcagaaacccgatggaaccg | |
| | | LIYDTSRLHSGVPSRFSGSGSGT | | ttaaactgctgatctacgatacctcacgccttcattctggcgtaccaagccggttttctggctct | |
| | | DYTLTISSLKQEDFATYYCQQGY | | ggcagtggcactgactacacacttaccatttcctccttgaaacaggaggattttgccacctacta | |
| | | TLPWTFGQGTKLEIKRTVAAPSV | | ttgccagcaagggtacacactgccttggacttttgggcaaggaacgaagttggagataaagcgga | |
| | | FIFPPSDEQLKSGTASVVCLLNN | | ctgttgctgctcctagcgtgttcatcttcccacccagtgacgaacagctcaagagcggtactgct | |
| | | FYPREAKVQWKVDNALQSGNSQE | | agcgtggtctgcttgctgaacaacttctatcccagagaggctaaagtgcagtggaaggtcgataa | |
| | | SVTEQDSKDSTYSLSSTLTLSKA | | tgccctccagtctgggaatagccaggaatccgtgactgaacaggactccaaggacagtacctata | |
| | | DYEKHKVYACEVTHQGLSSPVTK | | gcctgtctagcacactgacactgtcaaaagccgattatgagaagcacaaggtctatgcctgtgag | |
| | | SFNRGEC | | gtaacacaccaaggcctttcctctcctgtgacaaagagtttcaatcgaggagaatgc | |
| human- | Heavy | QVQLVQSGPEVKKPGASVKIPCK | 333 | caggttcagctggtccaatccgggcccgaggttaagaagcccggagctagcgtcaagataccctg | 334 |
| ized | Chain | ASGYTFTDYNVDWVRQVPGQGLE | | caaagctagtggctataccttcacagactacaatgtagactgggttcggcaagtacccggtcagg | |
| HM297- | | WMGDIDPNNGGTIYNQKFKDRVT | | gcttggagtggatgggagatatcgaccccaataatggagggactatctacaaccagaaattcaag | |
| H5- | | MTVDKSTRTAYMELRSLRSDDTA | | gatcgtgtcacaatgacggtggacaagagtacaaggaccgcctacatggagctgcgaagcttgcg | |
| X3-KI | | VYYCARWRGAMDYWGQGTLVTVS | | ctctgacgatacagccgtctactactgtgctaggtggagaggtgccatggactattggggccagg | |
| | | SASTKGPSVFPLAPSSKSTSGGT | | gcaccctggtaaccgtgtcatctgcctccaccaaaggcccctctgtgtttccactggcaccaagc | |
| | | AALGCLVKDYFPEPVTVSWNSGA | | tcasagtcaaccagtggtggaaccgctgctctgggctgtctggttaaggactatttccccgaacc | |
| | | LTSGVHTFPAVLQSSGLYSLSSV | | tgtaaccgtaagctggaatagtggcgcactgacctccggggtccacacatttcccgccgtgctgc | |
| | | VTVPSSSLGTQTYICNVNHKPSN | | agagttcaggcctctattccctcagctccgtcgtgactgtcccctcctcttcccttggtactcag | |
| | | TKVDKKVEPKSCDKTHTCPPCPA | | acttacatctgcaacgtgaaccacaagccctccaacaccaaggtggacaagaaggtcgagcccaa | |
| | | PELLGGPDVFLFPPKPKDTLMIS | | gtcctgcgacaagacccacacctgccccccctgccccgcccccgagctgctgggcggccccgacg | |
| | | RTPEVTCVVVDVSDEDPEVKFNW | | tgttcctgttcccccccaagcccaaggacaccctgatgatctccaggacccccgaggtgacctgc | |
| | | YVDGVEVHNAKTKPREEQYNSTY | | gtggtggtggacgtgTCCgacgaggaccccgaggtgaagttcaactggtacgtggacggcgtgga | |
| | | RVVSVLTVLHQDWLNGKEYKCAV | | ggtgcacaacgccaagaccaagcccagggaggagcagtacaactccacctacagggtggtgtccg | |
| | | SNKALPAPEEKTISKAKGQPREP | | tgctgaccgtgctgcaccaggactggctgaacggcaaggagtacaagtgcgccgtgtccaacaag | |
| | | QVYTLPPSRDELTKNQVSLTQLV | | gccctgcccgcccccGAGgagaagaccatctccaaggccaagggccagcccagggagccccaggt | |
| | | KGFYPSDIAVEWESNGQPENNYK | | gtacaccctgcccccctccagggacgagctgaccaagaaccaggtgtccctgacctgcctggtga | |
| | | TTPPVLDSDGSFFLYSKLTVDKS | | agggcttctacccctccgacatcgccgtggagtgggagtccaacggccagcccgagaacaactac | |
| | | RWQQGNVFSCSVMHEALHNHYTQ | | aagaccaccccccccgtgctggactccgacggctccttcttcctgtactccaagctgaccgtgga | |
| | | KSLSLSPGK | | caagtccaggtggcagcagggcaacgtgttctcctgctccgtgatgcacgaggccctgcacaacc | |
| | | | | actacacccagaagtccctgtccctgtcccccggcaag | |
| | Light | DIQMTQSPSSLSASVGDRVTITC | 335 | gacatccagatgacccagtcaccatcctctctgtccgcaagtgtgggtgatagggtgacgattac | 336 |
| | Chain | RASQDIDNYLKWYQQKPDGTVKL | | ctgtcgtgcctcacaagacatcgacaactacctcaagtggtaccagcagaaacccgatggaaccg | |
| | | LIYDTSRLHSGVPSRFSGSGSGT | | ttaaactgctgatctacgatacctcacgccttcattctggcgtaccaagccggttttctggctct | |
| | | DYTLTISSLKQEDFATYYCQQGY | | ggcagtggcactgactacacacttaccatttcctccttgaaacaggaggattttgccacctacta | |
| | | TLPWTFGQGTKLEIKRTVAAPSV | | ttgccagcaagggtacacactgccttggacttttgggcaaggaacgaagttggagataaagcgga | |
| | | FIFPPSDEQLKSGTASVVCLLNN | | ctgttgctgctcctagcgtgttcatcttcccacccagtgacgaacagctcaagagcggtactgct | |
| | | FYPREAKVQWKVDNALQSGNSQE | | agcgtggtctgcttgctgaacaacttctatcccagagaggctaaagtgcagtggaaggtcgataa | |
| | | SVTEQDSKDSTYSLSSTLTLSKA | | tgccctccagtctgggaatagccaggaatccgtgactgaacaggactccaaggacagtacctata | |
| | | DYEKHKVYACEVTHQGLSSPVTK | | gcctgtctagcacactgacactgtcaaaagccgattatgagaagcacaaggtctatgcctgtgag | |
| | | SFNRGEC | | gtaacacaccaaggcctttcctctcctgtgacaaagagtttcaatcgaggagaatgc | |
| human- | Heavy | QVQLVQSGPEVKKPGASVKIPCK | 337 | caggttcagctggtccaatccgggcccgaggttaagaagcccggagctagcgtcaagataccctg | 338 |
| ized | Chain | ASGYTFTDYNVDWVRQVPGQGLE | | caaagctagtggctataccttcacagactacaatgtagactgggttcggcaagtacccggtcagg | |
| HM297- | | WMGDIDPNNGGTIYNQKFKDRVT | | gcttggagtggatgggagatatcgaccccaataatggagggactatctacaaccagaaattcaag | |
| H5- | | MTVDKSTRTAYMELRSLRSDDTA | | gatcgtgtcacaatgacggtggacaagagtacaaggaccgcctacatggagctgcgaagcttgcg | |
| X4-KS | | VYYCARWRGAMDYWGQGTLVTVS | | ctctgacgatacagccgtctactactgtgctaggtggagaggtgccatggactattggggccagg | |
| | | SASTKGPSVFPLAPSSKSTSGGT | | gcaccctggtaaccgtgtcatctgcctccaccaaaggcccctctgtgtttccactggcaccaagc | |
| | | AALGCLVKDYFPEPVTVSWNSGA | | tcaaagtcaaccagtggtggaaccgctgctctgggctgtctggttaaggactatttccccgaacc | |
| | | LTSGVHTFPAVLQSSGLYSLSSV | | tgtaaccgtaagctggaatagtggcgcactgacctccggggtccacacatttcccgccgtgctgc | |
| | | VTVPSSSLGTQTYICNVNHKPSN | | agagttcaggcctctattccctcagctccgtcgtgactgtcccctcctcttcccttggtactcag | |
| | | TKVDKKVEPKSCDKTHTCPPGPA | | acttacatctgcaacgtgaaccacaagccctccaacaccaaggtggacaagaaggtcgagcccaa | |
| | | PELLGGPDVFLFPPKPKDTLMIS | | gtcctgcgacaagacccacacctgccccccctgccccgcccccgagctgctgggcggccccgacg | |
| | | RTPEVTCVVVDVGDEDPEVKFNW | | Egttcctgttcccccccaagcccaaggacaccctgatgatctccaggacccccgaggtgacctgc | |
| | | YVDGVEVHNAKTKPREEQYNSTY | | gtggtggtggacgtgggcgacgaggaccccgaggtgaagttcaactggtacgtggacggcgtgga | |
| | | RVVSVLTVLHQDWLNGKEYKCAV | | ggtgcacaacgccaagaccaagcccagggaggagcagtacaactccacctacagggtggtgtccg | |
| | | SNKAYPAPEEKTISKAKGQPREP | | tgctgaccgtgctgcaccaggactggctgaacggcaaggagtacaagtgcgccgtgtccaacaag | |
| | | QVYTLPPSRDELTKNQVSLTCLV | | gccTACcccgcccccGAGgagaagaccatctccaaggccaagggccagcccagggagccccaggt | |
| | | KGFYPSDIAVEWESNGQPENNYK | | gtacaccctgcccccctccagggacgagctgaccaagaaccaggtgtccctgacctgcctggtga | |
| | | TTPPVLDSDGSFFLYSKLTVDKS | | agggcttctacccctccgacatcgccgtggagtgggagtccaacggccagcccgagaacaactac | |
| | | RWQQGNVFSCSVMHEALHNHYTQ | | aagaccaccccccccgtgctggactccgacggctccttcttcctgtactccaagctgaccgtgga | |
| | | KSLSLSPGK | | caagtccaggtggcagcagggcaacgtgttctcctgctccgtgatgcacgaggccctgcacaacc | |
| | | | | actacacccagaagtccctgtccctgtcccccggcaag | |
| | Light | DIQMTQSPSSLSASVGDRVTITC | 339 | gacatccagatgacccagtcaccatcctctctgtccgcaagtgtgggtgatagggtgacgattac | 340 |
| | Chain | RASQDIDNYLKWYQQKPDGTVKL | | ctgtcgtgcctcacaagacatcgacaactacctcaagtggtaccagcagaaacccgatggaaccg | |
| | | LIYDTSRLHSGVPSRFSGSGSGT | | ttaaactgctgatctacgatacctcacgccttcattctggcgtaccaagccggttttctggctct | |
| | | DYTLTISSLKQEDFATYYCQQGY | | ggcagtggcactgactacacacttaccatttcctccttgaaacaggaggattttgccacctacta | |
| | | TLPWTFGQGTKLEIKRTVAAPSV | | ttgccagcaagggtacacactgccttggacttttgggcaaggaacgaagttggagataaagcgga | |
| | | FIFPPSDEQLKSGTASVVCLLNN | | ctgttgctgctcctagcgtgttcatcttcccacccagtgacgaacagctcaagagcggtactgct | |
| | | FYPREAKVQWKVDNALQSGNSQE | | agcgtggtctgcttgctgaacaacttctatcccagagaggctaaagtgcagtggaaggtcgataa | |
| | | SVTEQDSKDSTYSLSSTLTLSKA | | tgccctccagtctgggaatagccaggaatccgtgactgaacaggactccaaggacagtacctata | |
| | | DYEKHKVYACEVTHQGLSSPVTK | | gcctgtctagcacactgacactgtcaaaagccgattatgagaagcacaaggtctatgcctgtgag | |
| | | SFNRGEC | | gtaacacaccaaggcctttcctctcctgtgacaaagagtttcaatcgaggagaatgc | |
| human- | Heavy | QVQLVQSGPEVKKPGASVKIPCK | 341 | caggttcagctggtccaatccgggcccgaggttaagaagcccggagctagcgtcaagataccctg | 342 |
| ized | Chain | ASGYTFTDYNVDWVRQVPGQGLE | | caaagctagtggctataccttcacagactacaatgtagactgggttcggcaagtacccggtcagg | |
| HM297- | | WMGDIDPNNGGTIYNQKFKDRVT | | gcttggagtggatgggagatatcgaccccaataatggagggactatctacaaccagaaattcaag | |
| H5- | | MTVDKSTRTAYMELRSLRSDDTA | | gatcgtgtcacaatgacggtggacaagagtacaaggaccgcctacatggagctgcgaagcttgcg | |
| X3-KE | | VYYCARWRGAMDYWGQGTLVTVS | | ctctgacgatacagccgtctactactgtgctaggtggagaggtgccatggactattggggccagg | |
| | | SASTKGPSVFPLAPSSKSTSGGT | | gcaccctggtaaccgtgtcatctgcctccaccaaaggcccctctgtgtttccactggcaccaagc | |
| | | AALGCLVKDYFPEPVTVSWNSGA | | tcaaagtcaaccagtggtggaaccgctgctctgggctgtctggttaaggactatttccccgaacc | |
| | | LTSGVHTFPAVLQSSGLYSLSSV | | tgtaaccgtaagctggaatagtggcgcactgacctccggggtccacacatttcccgccgtgctgc | |
| | | VTVPSSSLGTQTYICNVNHKPSN | | agagttcaggcctctattccctcagctccgtcgtgactgtcccctcctcttcccttggtactcag | |
| | | TKVDKKVEPKSCDKTHTCPPCPA | | acttacatctgcaacgtgaaccacaagccctccaacaccaaggtggacaagaaggtcgagcccaa | |
| | | PELLGGPDVFLFPPKPKQTLMIS | | gtcctgcgacaagacccacacctgccccccctgccccgcccccgagctgctgggcggccccgacg | |
| | | RTPEVTCVVVDVSDEDPEVKFNW | | tgttcctgttcccccccaagcccaaggacaccctgatgatctccaggacccccgaggtgacctgc | |
| | | YVDGVEVHNAKTKPRAEQYNSTY | | gtggtggtggacgtgagtgacgaggaccccgaggtgaagttcaactggtacgtggacggcgtgga | |
| | | RVVSVLTVLHQDWLNGKEYKCAV | | ggtgcacaacgccaagaccaagcccagggccgagcagtacaactccacctacagggtggtgtccg | |
| | | SNKALPAPIEKTISKAKGQPREP | | tgctgaccgtgctgcaccaggactggctgaacggcaaggagtacaagtgcgccgtgtccaacaag | |
| | | QVYTLPPSRDELTKNQVSLTCLV | | gccctgcccgcccccatcgagaagaccatctccaaggccaagggccagcccagggagccccaggt | |
| | | KGFYPSDIAVEWESNGQPENNYK | | gtacaccctgcccccctccagggacgagctgaccaagaaccaggtgtccctgacctgcctggtga | |
| | | TTPPVLDSDGSFFLYSKLTVDKS | | agggcttctacccctccgacatcgccgtggagtgggagtccaacggccagcccgagaacaactac | |
| | | RWQQGNVFSCSVMHEALHNHYTQ | | aagaccaccccccccgtgctggactccgacggctccttcttcctgtactccaagctgaccgtgga | |
| | | KSLSLSPGK | | caagtccaggtggcagcagggcaacgtgttctcctgctccgtgatgcacgaggccctgcacaacc | |
| | | | | actacacccagaagtccctgtccctgtcccccggcaag | |
| | Light | DIQMTQSPSSLSASVGDRVTITC | 343 | gacatccagatgacccagtcaccatcctctctgtccgcaagtgtgggtgatagggtgacgattac | 344 |
| | Chain | RASQDIDNYLKWYQQKPDGTVKL | | ctgtcgtgcctcacaagacatcgacaactacctcaagtggtaccagcagaaacccgatggaaccg | |
| | | LIYDTSRLHSGVPSRFSGSGSGT | | ttaaactgctgatctacgatacctcacgccttcattctggcgtaccaagccggttttctggctct | |
| | | DYTLTISSLKQEDFATYYCQQGY | | ggcagtggcactgactacacacttaccatttcctccttgaaacaggaggattttgccacctacta | |
| | | TLPWTFGQGTKLEIKRTVAAPSV | | ttgccagcaagggtacacactgccttggacttttgggcaaggaacgaagttggagataaagcgga | |
| | | FIFPPSDEQLKSGTASVVCLLNN | | ctgttgctgctcctagcgtgttcatcttcccacccagtgacgaacagctcaagagcggtactgct | |
| | | FYPREAKVQWKVDNALQSGNSQE | | agcgtggtctgcttgctgaacaacttctatcccagagaggctaaagtgcagtggaaggtcgataa | |
| | | SVTEQDSKDSTYSLSSTLTLSKA | | tgccctccagtctgggaatagccaggaatccgtgactgaacaggactccaaggacagtacctata | |
| | | DYEKHKVYACEVTHQGLSSPVTK | | gcctgtctagcacactgacactgtcaaaagccgattatgagaagcacaaggtctatgcctgtgag | |
| | | SFNRGEC | | gtaacacaccaaggcctttcctctcctgtgacaaagagtttcaatcgaggagaatgc | |

[0108] As used herein, the “functional fragment” typically means a molecule which has one or plurality of the scFv, Fv, F(ab′)2, Fab′ or Fab of the antibody of the present invention, and such molecule preferably binds to Fc receptors. Specific examples of functional fragment include, but are not limited to, an antibody-drug complex composed of the antibody of the present invention and a drug; a polypeptide having the scFv of the antibody of the present invention and the scFv of an anti-Fc receptor antibody; and a fusion protein having the scFv of the antibody of the present invention and an Fc region. When a functional fragment has an Fc region (for example, when a functional fragment is a fusion protein of the scFv of the antibody of the present invention and an Fc region), it is desirable that the Fc region is the Fc region of the Fc region-modified forms described in the present specification. The protein improvement and codon optimization techniques mentioned above may also be applied to functional fragments.

[0109] The antibody of the present invention and a functional fragment thereof may be prepared as a recombinant antibody or a functional fragment thereof by genetic engineering techniques. Briefly, a DNA encoding a heavy chain gene and a light chain gene of the antibody of the present invention or a DNA encoding a functional fragment of the antibody of the present invention is synthesized, inserted into an expression vector (e.g., plasmid, bacteriophage, or virus), and then introduced into host cells (e.g., CHO cells, HEK cells, etc.). By culturing the host cells, recombinant antibodies or functional fragments thereof can be obtained from the culture. Codon optimization is preferable in synthesizing a DNA encoding a heavy chain gene and a light chain gene of an antibody or a DNA encoding a functional fragment of an antibody. The heavy chain gene and the light chain gene of the antibody may be inserted into either the same expression vector or different expression vectors. The expression vector may comprise promoters, enhancers, polyadenylation signals, replication origins, selectable marker genes, and so forth. Further, the expression vector may include secretory signal peptide sequences.

[0110] The ratio of the heavy chain gene and the light chain gene of the antibody to be inserted into the expression vector is preferably 1:1 but may be appropriately changed in order to improve the expression level of the antibody. Introduction of the recombinant expression vector into host cells may be performed by known methods such as the calcium phosphate method, the DEAE-dextran method, microinjection, lipofection, electroporation, transduction, scrape loading, the shotgun method, etc. When host cells into which a recombinant expression vector has been introduced are cultured, a recombinant antibody or a functional fragment thereof is produced in the culture. Appropriate culture conditions (medium, culture time, culture temperature, CO₂ concentration, etc.) can be appropriately selected by one of ordinary skill in the art. The thus produced antibody or a functional fragment thereof may be recovered by known methods of protein separation/purification using isoelectric point, size, solubility (in water, organic solvent, etc.), affinity to a specific substance (substrate, coenzyme, etc. in the case of an enzyme), and so forth. In order to obtain a defucosylated form of a recombinant antibody or a functional fragment thereof, 2-deoxy-2-fluoro-L-fucose is added to the medium and host cells are cultured therein, or alternatively, fucosyltransferase 8 (FUT8)-deficient cells are used as host cells. Other methods may also be used. The defucosylated form may be separated and purified by the same method as described above.

[0111] The antibody of the present invention or a functional fragment thereof exerts a more potent T cell-suppressive action than CTLA-4-Ig in human T cell/B cell mixed lymphocyte reaction (MLR), and is capable of exhibiting an anti-inflammatory action mediated by suppression of the function of human T cells (see Example described later).

[0112] The antibody of the present invention or a functional fragment thereof may be used for treatment and/or prevention of inflammatory diseases. As used herein, inflammatory diseases refer to diseases caused by excessive inflammation resulting, for example, from wounds, chemical substances, infections, or recognition of self-tissue by immune cells. Inflammatory diseases include autoimmune diseases and diseases classified as type I-IV allergies. Specific examples of such inflammatory diseases include, but are not limited to, Behcet's disease, systemic lupus erythematosus, lupus nephritis, cutaneous lupus erythematosus, chronic discoid lupus erythematosus, serum sickness, systemic sclerosis (systemic scleroderma, progressive systemic sclerosis), multiple sclerosis, scleroderma, polymyositis, dermatomyositis, periarteritis nodosa (polyarteritis nodosa), aortitis syndrome (Takayasu arteritis), malignant rheumatoid arthritis, rheumatoid arthritis, arthritis, juvenile idiopathic arthritis, spondylarthrites, mixed connective tissue disease, Sjogren's syndrome, adult-onset Still's disease, vasculitis, allergic granulomatous angiitis, hypersensitivity angiitis, rheumatoid vasculitis, large-vessel vasculitis, ANCA-associated vasculitis (e.g., microscopic polyangiitis, granulomatosis with polyangiitis, and eosinophilic granulomatosis with polyangiitis), Cogan's syndrome, RS3PE, temporal arteritis, polymyalgia rheumatica, fibromyalgia, antiphospholipid antibody syndrome, eosinophilic fasciitis, IgG4-related diseases (e.g., primary sclerosing cholangitis, autoimmune pancreatitis, etc.), Guillain-Barre syndrome, myasthenia gravis, chronic atrophic gastritis, hepatitis, autoimmune hepatitis, nonalcoholic steatohepatitis, primary biliary cirrhosis, Goodpasture's syndrome, glomerulonephritis, rapidly progressive glomerulonephritis, megaloblastic anemia, hemolytic anemia, autoimmune hemolytic anemia, Coombs positive autoimmune hemolytic anemia, pernicious anemia, autoimmune neutropenia, idiopathic thrombocytopenia purpura, Basedow's disease (Graves disease (hyperthyroidism)), Hashimoto's thyroiditis, autoimmune adrenal insufficiency, primary hypothyroidism, Addison's disease (chronic adrenal insufficiency), idiopathic Addison's disease, type I diabetes mellitus, slowly progressive insulin-dependent diabetes mellitus (latent adult onset autoimmune diabetes), localized scleroderma, psoriasis, psoriatic arthritis, bullous pemphigoid, pemphigus, pemphigoid, herpes gestationis, linear IgA bullous skin disease, epidermolysis bullosa acquisita, alopecia areata, vitiligo, vitiligo vulgaris, Stevens-Johnson syndrome, fixed drug eruption, neuromyelitis optica, chronic inflammatory demyelinating polyneuropathy, multifocal motor neuropathy, sarcoidosis, giant cell arteritis, amyotrophic lateral sclerosis, Harada disease, autoimmune optic neuropathy, idiopathic azoospermia, spontaneous abortion, recurrent fetal loss, infertility, infertility related to lack of fetal-maternal tolerance, inflammatory bowel diseases (e.g., ulcerative colitis, Crohn's disease), celiac disease, ankylosing spondylitis, asthma, severe asthma, infections (viral, bacterial, fungal, parasitic), chronic obstructive pulmonary disease, urticaria, chronic urticaria, transplantation immunity, familial Mediterranean fever, eosinophilic sinusitis, eosinophilic gastrointestinal disease, dilated cardiomyopathy, systemic mastocytosis, inclusion body myositis, pelvic inflammatory disease, Alzheimer's disease, Peyronie's disease, gallbladder disease, pilonidal disease, peritonitis, surgical adhesions, stroke, Lyme disease, meningoencephalitis, autoimmune uveitis, non-infectious uveitis, hypersensitivity, chronic allergic diseases (atopic dermatitis, fever, allergic rhinitis), food allergy, conjunctivitis, anaphylactic shock, contact dermatitis, fibrosing alveolitis, hypersensitivity pneumonitis, allergic bronchopulmonary aspergillosis, allergic encephalitis, IgA nephropathy, Meniere's disease, cholangitis, pancreatitis, Trauma (surgery), acute and chronic graft-vs-host disease, transplant rejection, heart diseases (ischemic diseases such as myocardial infarction, atherosclerosis), intravascular coagulation, osteoporosis, osteoarthritis, periodontitis, hypoxia, gestational herpes, acquired hypogonadism, hypoparathyroidism, and cytokine storm.

[0113] The antibody of the present invention or a functional fragment thereof may be used for treatment and/or prevention of inflammatory diseases, especially those diseases in which T cells and autoantibodies are involved, such as systemic lupus erythematosus, lupus nephritis, multiple sclerosis, systemic sclerosis (systemic scleroderma, progressive systemic sclerosis), multiple sclerosis, scleroderma, polymyositis, dermatomyositis, rheumatoid arthritis, Sjogren's syndrome, allergic granulomatous angiitis, large-vessel vasculitis, ANCA-associated vasculitis (e.g., microscopic polyangiitis, granulomatosis with polyangiitis, and eosinophilic granulomatosis with polyangiitis), antiphospholipid antibody syndrome, IgG4-related diseases (e.g., primary sclerosing cholangitis, autoimmune pancreatitis, etc.), idiopathic thrombocytopenia purpura, Basedow's disease (Graves' disease (hyperthyroidism)), Hashimoto's throiditis, psoriasis, psoriatic arthritis, bullous pemphigoid, pemphigus, pemphigoid, alopecia areata, vitiligo, vitiligo vulgaris, Stevens-Johnson syndrome, fixed drug eruption, neuromyelitis optica, inflammatory bowel diseases (e.g., ulcerative colitis, Crohn's disease), asthma, and acute and chronic graft-vs-host disease.

[0114] The present invention provides a pharmaceutical composition comprising an agonist antibody to human PD-1 (anti-human PD-1 agonist antibody) or a functional fragment thereof, wherein the antibody or a functional fragment thereof binds to domain #7 of human PD-1 as shown in SEQ ID NO: 9, and a pharmaceutically acceptable carrier. The pharmaceutical composition of the present invention may be used as a pharmaceutical drug.

[0115] The pharmaceutical composition of the present invention may be administered to subjects (human or non-human animal) systemically or locally by an oral or parenteral route.

[0116] The pharmaceutical composition of the present invention may comprise an effective amount of the anti-human PD-1 agonist antibody or a fragment thereof, and may be formulated into a preparation by mixing, dissolving, emulsifying, encapsulating, lyophilizing, etc. with a pharmaceutically acceptable carrier.

[0117] The pharmaceutical composition of the present invention is suitable for either oral or parenteral administration. Preferable preparations for oral administration include, but are not limited to, liquids which have an effective amount of the anti-human PD-1 agonist antibody or a functional fragment thereof dissolved in a diluent such as water or physiological saline; capsules, granules, powders or tablets containing an effective amount of said antibody or fragment as a solid or granules; suspensions which have an effective amount of said antibody or fragment is suspended in an appropriate dispersion medium; and emulsions prepared by first dissolving an effective amount of said antibody or fragment in a solution which is then dispersed and emulsified in an appropriate dispersion medium.

[0118] For parenteral administration, the anti-human PD-1 agonist antibody or a functional fragment thereof may be formulated into injections (including lyophilized formulation), suspensions, emulsions, creams, ointments, inhalants, suppositories or the like, together with pharmaceutically acceptable solvents, excipients, binders, stabilizers, dispersants and the like. In the formulation of injections, the anti-human PD-1 agonist antibody or a functional fragment thereof may be dissolved in an aqueous solution (preferably Hanks solution or Ringer solution) or a physiologically compatible buffer such as physiological saline buffer. Further, the pharmaceutical composition of the present invention may take the form of suspension, solution or emulsion, etc. in an oily or aqueous vehicle. Alternatively, the anti-human PD-1 agonist antibody or a functional fragment thereof may be produced in the form of a powder, which may be prepared into an aqueous solution or suspension with sterile water or the like before use. For administration by inhalation, the anti-human PD-1 agonist antibody or a functional fragment thereof may be pulverized to prepare a powder mixture with an appropriate base such as lactose or starch. Suppository formulations may be prepared by mixing the anti-human PD-1 agonist antibody or a functional fragment thereof with a routinely used suppository base such as cocoa butter. Further, the pharmaceutical composition may be formulated as a sustained release preparation by encapsulating in a polymer matrix or the like. Parenteral administration includes, but are not limited to, intravenous, intramuscular, subcutaneous, rectal, nasal, intraoral, and transdermal administration.

[0119] The dose may be about 0.1 to 100 mg/kg (body weight) per human adult, and this dose may be administered once or multiple times at intervals of about 1 day to 6 months.

[0120] The pharmaceutical composition of the present invention may be used alone. Alternatively, the composition may be used in combination with other therapeutics such as antihistamines, antiallergics, vasoconstrictive nasal sprays, steroids, small molecule immunosuppressants (cyclosporine, tachlorimus, etc.), antibody preparations (e.g., anti-IgE antibody, anti-IL-4 antibody, anti-IL-5 antibody, anti-IL-6 antibody, anti-IL-13 antibody, anti-IL-4 receptor antibody, anti-IL-5 receptor antibody, anti-IL-22 antibody, anti-IL-25 antibody, anti-IL-33 antibody, anti-TNF-α antibody, anti-TSLP antibody, anti-BAFF antibody, etc.), and recombinant soluble fusion proteins (CTLA-4-Ig, etc.). From such a combined use, synergism of drug efficacies can be expected.

### EXAMPLES

[0121] Hereinbelow, the present invention will be described more specifically with reference to the following Example.

### Methods

### Commercially Available Antibodies, Commercially Available Fusion Proteins, and Known Antibodies

[0122] Regarding commercially available antibodies and recombinant protein: Anti-human PD-1 antibody (clone: EH12.2H7, BioLegend), anti-human PD-1 antibody (clone: J116, Invitrogen), anti-human PD-1 antibody (clone: MIH4, Invitrogen), control mouse IgG1 (clone: MOPC-21, BioLegend), control human IgG1 (clone: QA16A12, BioLegend), control human IgG4 (clone: QA16A15, BioLegend), and recombinant human CTLA-4-Fc region chimeric protein (CTLA-4-Ig, Cat #: 591908, BioLegend) were used. Regarding known antibodies: 949 (anti-human PD-1 antibody described in WO2011/110621, its sequence of Fc region is human IgG4-S228P), PD1AB-6 (PD1AB-6-IgG1-K322A described in WO2017/058859), PD1-17 (anti-human PD-1 antibody described in WO2004/056875, its sequence of Fc region is human IgG1), 3.7C6 (anti-human PD-1 antibody described in WO2020/247648, its sequence of Fc region is human IgG1) and Antibody 1 (anti-human PD-1 antibody described in WO2019/168745, its sequence of Fc region is human IgG1) were prepared by the method described in below.

### Acquisition and Purification of Novel Antibodies

[0123] Techniques for producing anti-human PD-1 mouse monoclonal antibody are known in the art. For example, the method described in Goding, Monoclonal Antibodies: Principles and Practice, pp. 59-103 (Academic Press, 1986) was used. As immunization host, A/J and BALB/c mice were used. As immunogens, a plasmid vector expressing the full length or a mutant of human PD-1 protein (NCBI accession number: NP_005009.2) (15-50 μg), a fusion protein of recombinant human PD-1 extracellular domain and human IgG1-Fc region (25 μg), and 293T cells so engineered to transiently express human PD-1 or a mutant thereof (5×10⁷ cells) were used. One of these immunogens was intramuscularly, intradermally, intraperitoneally or intravenously injected at an interval of 10 to 50 days. When adjuvant was necessary; Sigma adjuvant system (S6322-1VL; Sigma-Aldrich) was used. Three days after the final immunization, splenocytes of the immunization host and P3U1 mouse myeloma cells were fused to prepare hybridomas. Screening for hybridomas producing anti-human PD-1 antibody was performed as follows. Briefly, the culture supernatant of each hybridoma was added to HEK293 cells which had been rendered to express human PD-1. After staining with R-phycoerythrin-labeled goat anti-mouse IgG(H+L) F(ab′)2 fragment (115-116-146; Jackson ImmunoResearch) as secondary antibody; flow cytometry was performed for analysis. Finally selected hybridomas were cloned by limiting dilution analysis, and cultured at high density in a cell line bioreactor (Wheaton). From the resultant culture supernatants, anti-human PD-1 antibodies were purified using Ab-Capture ExTra (P-003-10; Protenova).

### Antibody Sequencing

[0124] In order to specify the variable region sequence of anti-human PD-1 antibodies, frozen hybridomas were sent to BizComJapan, Inc. to use contract analysis services provided by Fusion Antibodies, Plc.

### Humanization of Anti-Human PD-1 Antibody

[0125] To perform humanization, the complementarity determining region (CDR) of mouse antibody and the residues necessary for retaining CDR conformation of mouse antibody were transplanted into the framework of human antibody.

### Expression and Purification of Recombinant Antibodies

[0126] A heavy chain expression vector was constructed using a DNA encoding a heavy chain sequence and an expression vector (pcDNA3.4, Thermo Fisher Scientific). Likewise, a light chain expression vector was constructed using a DNA encoding a light chain sequence and an expression vector (pcDNA3.4, Thermo Fisher Scientific). The two vectors were mixed in such a manner that the ratio of heavy chain and light chain would be 1:1, and transfected into CHO cells at 0.8 μg of DNA per ml of culture medium using ExpiFectamine CHO Reagent (Thermo Fisher Scientific). One day after the transfection, ExpiCHO Feed and ExpiFectamine CHO Enhancer were added to the cells, which were then cultured at 32° C. for 10 to 12 days. The culture medium was subjected to centrifugation and filtration to remove cells and the supernatant was collected. The amount of antibody in the culture supernatant was measured with Cedex Bio (Roche Diagnostic). The culture supernatant was applied to Protein A column pre-equilibrated with phosphate-buffered saline (PBS), and then the column was washed with PBS. Antibody was eluted with citrate buffer (pH 3.4), and the eluent was neutralized by adding 160 μl of 1M Tris-HCl (pH 9.0) per ml of eluent. After concentration by ultrafiltration, antibody was purified by gel filtration chromatography using Superdex 200 Increase 10/300 GL (Cytiva). Defucosylated antibody was prepared by adding 2-deoxy-2-fluoro-L-fucose (2-DFF) to the culture medium to give a final concentration of 10 to 1000 μM. Comparable levels of FcγRIIIA binding affinity were observed when the final concentration of 2-DFF was within the range of 10 to 1000 μM. Purification of the defucosylated antibody was performed in the same manner as described above.

### Analysis by SDS-PAGE

[0127] The purified antibody was suspended in a sample buffer (with reductant and without reductant) and heated at 98° C. for 3 minutes. The resultant sample was applied to 4-15% Mini-PROTEAN TGX polyacrylamide gel (Bio-Rad) and electrophoresed at a constant voltage of 200 V for 30 minutes. Staining was performed with SYPRO Ruby Protein Gel Stain (Thermo Fisher Scientific), followed by analysis with LAS500 (Cytiva).

### Analysis by SEC-HPLC

[0128] The ratio of monomers contained in samples was measured by SEC-HPLC. As a column, TSKgel G3000SWXL, 5 μm, 7.8 mm×300 mm (TOSOH) was used. As regards a mobile phase, 84.4 g of potassium dihydrogen phosphate and 66.2 g of dipotassium hydrogen phosphate were dissolved in water to give a 1000 ml solution, which was diluted 10-fold for use. For the ratio of monomers, each corresponding peak area of a sample solution was measured by the automatic integration method, and the proportions of the respective areas were determined by the area normalization method.

Evaluation of Thermal Stability with Differential Scanning Calorimeter

[0129] For evaluation of the thermal stability of anti-human PD-1 antibody, denaturation midpoint temperature (Tₘ) and denaturation onset temperature (Tₒₙₛₑₜ), each used as a predictive indicator, were measured. For 400 μl aliquots of anti-human PD-1 antibody sample (diluted to 0.1 mg/ml), calorimetric change that occurred when temperature was raised from 25° C. to 100° C. at a rate of 200° C./hr was measured with a differential scanning calorimeter (Microcal PEAQ-DSC; Malvern Panalytical). As a reference for measurement, PBS was used. With respect to the resultant data, baseline correction based on the result of buffer measurement and fitting analysis with a non-two-state model were conducted. Then, Tₘ and Tₒₙₛₑₜ for Fab, CH2 and CH3 regions were calculated.

### PD-1 Binding Affinity Measurement Test Using Surface Plasmon Resonance Technique

[0130] The binding affinity of each antibody to human PD-1 was measured with Biacore 8K (Cytiva). Briefly, anti-His Tag antibody was immobilized by amine coupling using Amine Coupling Kit and His Capture Kit, onto 8 channels of a sensor chip (provided with 16 flow cells; one channel consisting of two flow cells) which had carboxymethyl dextran immobilized on a gold film. The immobilization was performed by feeding an activation solution (NHS and EDC mixed in equal amounts) at a flow rate of 10 μl/min for 7 minutes, an immobilization solution at a flow rate of 5 μl/min for 7 minutes, and 1 M ethanolamine hydrochloride-NaOH (pH 8.5) at a flow rate of 10 μl/min for 7 minutes. The buffer used at the time of immobilization was 1×HBS-EP+ Buffer. After the immobilization and before applying a sample, Human PD-1/PDCD1 Protein (PD-1) adjusted to 1 μg/ml with 1×HBS-EP+ Buffer was fed to one of the two flow cells of each channel in an amount of 20 μl at a flow rate of 10 μl/min to thereby capture PD-1 on the sensor chip. As regards the other flow cell, 1×HBS-EP+ Buffer was fed in the same manner to prepare a control flow cell. Each antibody was adjusted to 16 nM with 1×HBS-EP+ Buffer, and then subjected to 2-fold 7-step serial dilution using 1×HBS-EP+ Buffer. The resultant sample solution (30 μl) was fed to each flow cell at a flow rate of 10 μl/min and the response was measured. After subtracting the response of control flow cell from the response of the flow cell which was allowed to capture the ligand, K_{D} value was calculated by curve fitting using Biacore 8K Evaluation Software.

### Fc Receptor Binding Affinity Measurement Test Using Surface Plasmon Resonance Technique

[0131] The binding affinity of each antibody to Fc receptors [FcγRIIB/C (CD32b/c) (FcγRIIB) (R&D Systems) and Fc gamma RIIIA/CD16a, CF (FcγRIIIA(V158)) (R&D Systems)] was measured with Biacore 8K. Briefly, anti-His Tag antibody was immobilized by amine coupling using Amine Coupling Kit and His Capture Kit onto 8 channels of a sensor chip (provided with 16 flow cells; one channel consisting of two flow cells) which had carboxymethyl dextran immobilized on a gold film. The immobilization was performed by feeding an activation solution (NHS and EDC mixed in equal amounts) at a flow rate of 10 μl/min for 7 minutes, an immobilization solution at a flow rate of 5 μl/min for 7 minutes, and 1 M ethanolamine hydrochloride-NaOH (pH 8.5) at a flow rate of 10 μl/min for 7 minutes. The buffer used at the time of immobilization was 1×HBS-EP+ Buffer. After the immobilization and before applying a sample, Fc receptor adjusted to 1 μg/ml with 1×HBS-EP+ Buffer was fed to one of the two flow cells of each channel in an amount of 20 μl at a flow rate of 10 μl/min to thereby capture Fc receptor on the sensor chip. As regards the other flow cell, 1×HBS-EP+ Buffer was fed in the same manner to prepare a control flow cell. Each antibody was adjusted to 1 mg/ml with 1×HBS-EP+ Buffer, and then subjected to 2-fold 7-step serial dilution using 1×HBS-EP Buffer (when measuring FcγRIIIA(V158), 4-fold 7-step serial dilution was performed). The resultant sample solution (15 μl) was fed to each flow cell at a flow rate of 30 μl/min and the response was measured. After subtracting the response of control flow cell from the response of the flow cell which was allowed to capture the ligand, K_{D} value was calculated by analysis of equilibrium constants using Biacore8 K Evaluation Software.

### Activity Evaluation on Cell Lines

[0132] The activity of anti-human PD-1 antibody was evaluated as an effect on cytokine production caused by interaction between human PD-1-expressing T cells and antigen-presenting cells. Prepared as T cells were: a cell line obtained by treating DO11.10 T cell hybridoma cell line (kindly provided by Department of Immunology and Genomic Medicine, Graduate School of Medicine, Kyoto University) with Cas9 (Invitrogen) to knock-out mouse PD-1; and the knock-out cell line which was rendered to express human PD-1. Prepared as antigen-presenting cells were: a cell line obtained from IIA1.6 B cell line (kindly provided by Department of Immunology and Genomic Medicine, Graduate School of Medicine, Kyoto University) by knocking out mouse PD-L1; and the knock-out cell line which was rendered to express human PD-L1 or mouse FcγRIIB. For evaluating human PD-1 agonist activity, mouse or human FcγRIIB-expressing IIA1.6 cells were used; and for evaluating antagonist activity, human PD-L1-expressing IIA1.6 cells were used. Further, for evaluating dependency on each Fc receptor, IIA1.6 cells expressing various human Fc receptors were used. Human PD-1-expressing DO11.10 T cell hybridomas and respective IIA1.6 cells were suspended in a medium (10% fetal bovine serum-containing RPMI1640 medium). DO11.10 T cell hybridomas and IIA1.6 cells were seeded in round bottom 96-well plates at 5×10⁴ and 1×10⁴ cells/well/50 μl, respectively. Anti-human PD-1 antibody was added to the plates to give a final concentration of 5, 0.5, 0.05 or 0.005 μg/ml at 50 μl/well. Subsequently, OVA₃₂₃₋₃₃₉ peptide (Eurofins) was added as antigen to give a final concentration of 2 μg/ml at 50 μl/well. Eighteen hours later, IL-2 concentration in the culture supernatant was measured using mouse IL-2 DuoSet ELISA (R&D Systems).

[0133] In the evaluation of human PD-1 agonist activity, the cytokine suppression obtained by using human PD-L1-expressing IIA1.6 cells was taken as positive control; and the result obtained by using DO11.10 T cell hybridomas not rendered to express human PD-1 was taken as negative control. In the evaluation of human PD-1 antagonist activity, anti-human PD-1 antibody (clone: EH12.2H7) with known antagonist activity was used.

Measurement of Affinity to Human Fc Receptor-Expressing Cell Line with Flow Cytometer

[0134] Various antibodies (5 μg/ml, 50 μl each) were added to IIA1.6 cells which had been rendered to express human FcγRIIB or human FcγRIIIA. The cells were incubated at 4° C. for 15 minutes. Then, cells were washed, and antibodies bound to cell surfaces were stained by incubating with APC-labeled anti-human IgG Fab antibody at 4° C. for 15 minutes. After washing cells again, antibodies bound to cell surfaces were detected by FACS analysis and GMFI was calculated as affinity to FcγRIIB or FcγRIIIA.

### Analysis of the Binding Characteristics of Anti-Human PD-1 Antibody

[0135] The gene of human PD-1 (wild-type) or substituted human PD-1 in which regions 1 to 8 as shown in FIG. 2A were replaced with mouse sequences and a gene of fluorescent protein such as GFP were co-expressed in a cell line (such as DO11.10 T cell hybridoma or HEK293T) by means of a vector ligating the genes with IRES sequences. The expression level of PD-1 on this cell line is correlated with the expression level of fluorescent protein such as GFP. Anti-PD-1 antibody was bound to the PD-1/GFP expressing cells, and the bound antibody was detected with a secondary antibody labeled with a different fluorescent dye. Briefly, PD-1-expressing cells were seeded in V-shaped bottom 96-well plates at 1×10⁵ cells/well. To each cell pellet, 50 μl of anti-human PD-1 antibody adjusted to 5 μg/ml was added and mixed. The mixture was incubated at 4° C. for 15 minutes. After washing, BV421-labeled anti-mouse IgG antibody or BV421-labeled anti-human IgG antibody, each adjusted to 5 μg/ml, was added in 50 μl. The mixture was incubated at 4° C. for 15 minutes. After washing, cells were suspended in 200 μl of buffer, and passed through a 70 μm filter. The fluorescence intensity of the filtrate was measured with a flow cytometer. The thus obtained fluorescence intensity can be rephrased as the binding capacity of anti-human PD-1 antibody to human PD-1 (wild-type or substituted). When the binding capacity to substituted human PD-1 which had a specific region replaced with the corresponding sequence of mouse PD-1 decreased compared to the binding capacity to wild-type human PD-1, that specific region was defined as a region binding the antibody. Binding characteristics to R143A point mutant or substituted Mouse PD-1 (hu38-48) were also analyzed in the same manner.

Preparation of Human PD-1 Knock-In Mouse using Genome Editing

[0136] gRNA targeting 5′-GCCAGGGGCTCTGGGCATGT-3′ and a donor vector containing human PD-1 gene was microinjected into C57BL/6N mouse-derived pronuclear stage fertilized egg together with Cas9 protein (Invitrogen). The resultant egg was transplanted into the oviduct of foster mouse. With respect to the resultant mice (F0), indel mice were selected and mated with wild-type mice to obtain F1 mice. Those F1 mice confirmed for gene transfer were further mated to thereby obtain homozygous mice. These homozygous mice were used in experiments as human PD-1 knock-in mice.

Evaluation of PD-1 Agonist using House Dust Mite Extract (HDM)-Induced Allergy Model

[0137] In experiments under preventive regimen, HDM (D. Pteronyssinus; Greer) (total protein: 400 ng; 10 ng in terms of Derp1) was administered intraperitoneally to human PD-1 knock-in mouse. Simultaneously, 500 μg of anti-human PD-1 antibody was administered intraperitoneally (Day 0). Further, the same dose of anti-human PD-1 antibody was administered intraperitoneally after 3 days, 7 days and 10 days. In experiments under therapeutic regimen, anti-human PD-1 antibody was administered only once after 10 days. From 7 days after intraperitoneal administration of HDM, HDM (total protein 25 μg/25 μl) was administered intranasally under anesthesia. This intranasal administration was performed for 8 consecutive days. Four hours after final intranasal administration, mice were euthanized after collecting blood samples, and bronchoalveolar lavage fluid and the lung were collected. Mononuclear cells infiltrating into the alveoli were isolated from the bronchoalveolar lavage fluid. The lung was subjected to enzyme treatment and density gradient centrifugation to isolate mononuclear cells and the numbers of CD4⁺ T cells, eosinophils (CD11c″ SiglecF⁺) and the like were determined by FACS analysis. Intracellular cytokines in bronchoalveolar lavage fluid-derived mononuclear cells and lung-derived mononuclear cells were analyzed by FACS. Blood concentration of HDM specific IgE was measured by ELISA (mouse serum anti-HDM IgE antibody assay kit; Chondrex).

Evaluation of PD-1 Agonist using Acute Graft-Versus-Host Disease (GVHD) Model

[0138] Cyclophosphamide (Fuji Film Wako Pure Chemical) dissolved in PBS was intraperitoneally administered to BDF1 mice (recipient, H-2K^{b+}H-2K^{d+}) at a dose of 100 mg/kg (Day-1). One day later, splenocytes were collected from human PD-1 knock-in mice (donor, H-2K^{b+}H-2K^{d-}), washed with PBS, and suspended in PBS at 5×10⁷ cells/200 μl. This cell suspension was transferred into BDF1 mice in 200 μl via the tail vein (Day 0). After Day 0, anti-human PD-1 agonist antibody was administered intraperitoneally once every 3 to 4 days at a dose of 500 μg/mouse. For evaluating GVHD symptoms, body weights of mice were measured after 4, 7, 11 and 14 days and the percent weight loss from Day 0 was calculated. Further, blood samples were taken after 7 and 14 days. Plasma was collected by centrifugation, and then PBMC was isolated by density gradient centrifugation. After 14 days, mice were euthanized. The spleen and the liver were collected and cell suspensions were prepared. These suspensions were analyzed with a flow cytometer and cell counting was performed. From the results obtained, rates of PBMC and donor cells (H-2K^{b+}H-2K^{d-}) in the spleen or the liver and respective cell counts were calculated. Aspartate aminotransferase (AST) and alanine aminotransferase (ALT) in plasma were measured with Transaminase CII-Test Wako (Fuji Film), and IFN-γ concentration in plasma with Mouse IFN-γ ELISA MAX Deluxe (BioLegend).

### Evaluation of PD-1 Agonist Using EAE Model

[0139] Wild-type mice were immunized at two subcutaneous sites in the back with 100 μg each of MOG₃₅₋₅₅ peptide (Eurofins) emulsified by mixing with Freund's complete adjuvant. Pertussis toxin (Fuji Film Wako Pure Chemical, 400 ng) was administered to the mice via the tail vein. After 1 day, pertussis toxin (400 ng) was administered again. After 13 days, cells were isolated from the spleen and the axillary lymph node. CD8⁺ cells and Gr-1+ cells were removed with AutoMACS. The remaining cells were seeded in flat bottom 12-well plates at 1.05×10⁷ cells/well and cultured in the presence of 20 μg/ml MOG peptide and 10 ng/ml IL-23 for 5 days. On the first and second days of culture, cells were rendered to express human PD-1 using retrovirus. After 5 days of culture, cells were harvested and their concentration was adjusted with PBS so that the number of activated CD4⁺ T cells in lymphocytes would be 1×10⁶ in 200 μl. The resultant cell sample was transferred into wild-type mice via the tail vein at 200 μl/mouse (Day 0). After Day 0 of cell transfer, anti-human PD-1 agonist antibody was administered intraperitoneally at 500 μg/mouse once every 3 days. Measurement of body weight and scoring were performed at the timing indicated in FIG. 8. Scores were recorded as follows. 0: no symptom, 0.5: paralysis at the tip of the tail, 1.0: paralysis in the tail, 1.5: light paralysis in one lower limb, 2.0: light paralysis in both lower limbs, 2.5: paralysis in one lower limb, 3.0: paralysis in both lower limbs, 3.5: paralysis in four limbs, 4.0: moribundity, 5.0: death.

### Evaluation of PD-1 Agonist Using Colitis Model

[0140] Cells were prepared from the spleen and the lymph nodes of human PD-1 knock-in mice, and CD25⁻CD4⁺ cells were isolated with a cell sorter. These cells were suspended in PBS at 5×10⁵ cells/200 μl and transferred into RAG2 KO mice in 200 μl via the tail vein (Day 0). From Day 0, anti-PD-1 agonist antibody was administered to the mice intraperitoneally once every 3 to 4 days at 500 μg/mouse. Body weight was measured twice a week and the percent weight loss from Day 0 was calculated. At week 8, mice were euthanized, the colon was collected and its length was measured. Further, CD4⁺ T cells infiltrating inherently into the lamina propria of the colon were collected and analyzed with a flow cytometer after staining intracellular cytokines.

### Evaluation of PD-1 Agonist Using Chronic GVHD/Lupus-Like Model

[0141] Cyclophosphamide (Fuji Film Wako Pure Chemical) dissolved in PBS was intraperitoneally administered to BDF1 mice (recipient, H-2K^{b+}H-2K^{d+}) at a dose of 100 mg/kg (Day-1). After 1 day, splenocytes were collected from human PD-1 knock-in mice (donor, H-2K^{b+}H-2K^{d-}) and freed of CD8⁺ cells using AutoMACS. Subsequently, the resultant cells were washed with PBS, and suspended in PBS at 2×10⁷ cells/200 μl. This cell suspension was transferred into BDF1 mice in 200 μl via the tail vein (Day 0). From Day 0, anti-human PD-1 agonist antibody was administered intraperitoneally once every 3 to 4 days at a dose of 500 μg/mouse. For evaluating lupus-like symptoms, blood samples were weekly taken for 11 weeks, and plasma concentration of IL-21 or anti-dsDNA antibody was measured by ELISA. After 7 or 14 days, mice were euthanized and the spleen was collected to prepare cell suspensions. These donor-derived Tfh cells (CXCR5⁺ICOS⁺H-2K^{d-}CD4⁺) or recipient-derived germinal center B cells (CD95⁺GL7⁺H-2K^{d+}B220⁺), class-switched B cells (IgD⁻IgM⁻H-2K^{d+}B220⁺), and plasma cells (CD138⁺H-2K^{d+}CD19⁺) were analyzed with a flow cytometer.

### Evaluation of PD-1 Agonist in Human T Cell/B Cell Mixed Lymphocyte Reaction (MLR)

[0142] In mixed lymphocyte reaction of human CD4⁺ T cells (LONZA) and human CD19⁺ B cells (Precision for Medicine) both isolated from PBMC of healthy donors by negative selection, the activity of anti-human PD-1 agonist antibody against T cell's reaction to alloantigen was evaluated. Specifically, human T cells (2×10⁵ cells) stained with CFSE were mixed with B cells (1×10⁵ cells), and the mixture was seeded in round bottom 96-well plates at 200 μl/well. After culturing for 6 to 7 days, cells were harvested. The harvested cells were freed of B cells by negative selection with CD19 antibody. Then, B cells from the same donor were newly added to re-stimulate the T cells. At the time of this re-stimulation, anti-human PD-1 antibodies or CTLA-4-Ig were added simultaneously to give a final concentration of 5, 0.5, 0.05 or 0.005 μg/ml. After 12 hours, the culture supernatant was collected, and IFN-γ concentration was measured with Human IFN-γ ELISA MAX Deluxe (BioLegend).

### Evaluation of ADCC Activity

[0143] As a target cell, Raji-hPD-1 cells (InvivoGen) were suspended in a medium at 1.1×10⁶ cells/ml and seeded in round bottom 96-well plates at 90 μl/well. Simultaneously, anti-human PD-1 antibody was added to the plates at 20 μl/well to give a final concentration of 1000, 300, 100, 30, 10, 3, 1, 0.3, 0.1, 0.03 or 0.01 ng/ml. After one hour culture, Jurkat-Lucia NFAT-CD16 Cells (InvivoGen) were suspended as effector cells in a medium at 2.2×10⁶ cells/ml and added thereto at 90 μl/well. After 6-hour culture, 50 μl of QUANTI-Luc solution (InvivoGen) was added to 20 μl of the culture supernatant. Luminescence intensity was measured with a microplate reader.

### Evaluation of PD-1 Agonist in Antigen Response of Human PBMC

[0144] Frozen PBMC from healthy donor (Precision for Medicine) were thawed, suspended in a medium at 1×10⁷ cells/2 ml, and seeded in 12-well plates at 2 μl/well. After 24-hour preculture, cells were collected, stained with CFSE, suspended in a medium at 3×10⁶ cells/ml, and seeded in round bottom 96-well plates at 100 μl/well. As an antigen to this cell, tetanus toxoid (Merck) was added at 50 μl/well to give a final concentration of 1 μg/ml. Further, anti-human PD-1 antibodies or CTLA-4-Ig were added at 50 μl/well to give a final concentration of 5, 0.5, 0.05 or 0.005 μg/ml. After 4-5 days, proliferation of CD4⁺ T cells linked to CFSE as an indicator was evaluated with a flow cytometer. Further, IFN-γ concentration in the culture supernatant was measured with Human IFN-γ ELISA MAX Deluxe (BioLegend).

Evaluation of PD-1 Agonist with Respect to ERK Phosphorylation

[0145] Human PD-1-expressing DO11.10 T cell hybridomas and mouse FcγRIIB-expressing IIA1.6 cells were suspended in a medium (10% fetal bovine serum-containing RPMI1640 medium). DO11.10 T cell hybridomas and IIA1.6 cells were seeded in round bottom 96-well plates at 5×10⁴ and 1×10⁴ cells/well/50 μl, respectively. Control mouse antibody (MOPC-21) or anti-human PD-1 antibody HM266 was added to the plates at 50 μl/well to give a final concentration of 5 μg/ml. Subsequently, OVA₃₂₃₋₃₃₉ peptide (Eurofins) was added as antigen at 50 μl/well to give a final concentration of 2 μg/ml. Immediately after the addition of OVA (0 hour) or after incubating at a 37° C., 5% CO₂ for 2, 4 or 6 hours, cells were harvested. The resultant cells were fixed with 4% paraformaldehyde for 15 minutes, washed, and permeabilized with 0.1% Triton X-100 for 15 minutes. After washing, the cells were suspended in 50% methanol-PBS and left standing overnight at −20° C. After washing, the cells were stained with Alexa488-anti-phospho-p44/42 MAPK (Erk1/2) (Thr202/Tyr204) mAb, PE-anti-DO11.10 TCR mAb and APC-anti-B220 mAb. Stained cells were analyzed by FACS, and phosphorylated ERK positive ratio in DO11.10 (DO11.10 TCR⁺B220⁻) was calculated.

### Evaluation of PD-1 Agonist by T Cell-Dependent Antibody Response

[0146] Co-precipitate of NP-OVA (total protein: 100 μg) and alum adjuvant were administered intraperitoneally to human PD-1 knock-in mice; simultaneously, 500 μg of anti-human PD-1 antibody was administered intraperitoneally (Day 0). The same dose of anti-human PD-1 antibody was further administered intraperitoneally 3 days and 7 days after the first administration. Seven and 10 days after NP-OVA administration, blood samples were collected. Antigen-specific antibody titer and the amount of IL-21 in blood were measured by ELISA. Antibodies (anti-NP2 and anti-NP25) binding to a complex of 2 or 25 molecules of NP binding to one molecule of bovine serum albumin (BSA) were measured by ELISA, and were defined either as high affinity antigen-specific antibody or as low affinity antigen-specific antibody. Further, mice were euthanized 10 days after immunization with antigen, and the spleen was collected to prepare cell suspensions. These Tfh cells (CXCR5⁺ICOS⁺CD4⁺), germinal center B cells (CD95⁺GL7⁺B220⁺), class-switched B cells (IgD⁻IgM⁻B220⁺) and plasma cells (CD138⁺B220⁻) were analyzed with a flow cytometer.

### Evaluation of PD-1 Agonist in Co-Culture System of Activated Human T Cells or Human Tfh-Like Cells and THP-1 Cells

[0147] Activated human T cells were prepared as described below. Briefly, human CD4⁺ T cells isolated from PBMC of healthy donors by negative selection (LONZA) were adjusted to 1×10⁶ cells/ml, seeded in anti-CD3 antibody (3 μg/ml) immobilizing 24-well plates at 1 ml/well, and stimulated for 3 days. Human Tfh-like cells were prepared as described below. Briefly, naïve T cell (CD45RA⁺CXCR5⁻CD11c⁻) fraction was sorted from human CD4⁺ T cells with a cell sorter and adjusted to 1×10⁶ cells/ml. 25 μl of pre-washed Dynabeads Human T-activator CD3/28 (Thermo Fisher) per 1 ml of the sorted cells was added. The resultant mixture of cells and beads was seeded at 1 ml/well in 24 well plates. On the following day, cells which had been stimulated with the beads were harvested. After removal of the beads, cells were adjusted to 5×10⁵ cells/ml, and seeded at 100 μl/well in anti-CD3 antibody (5 μg/ml) immobilized flat bottom 96-well plates. Subsequently, Human IL-23 (final concentration: 25 ng/ml), Human TGFβ (final concentration: 5 ng/ml), Human IL-12 (final concentration: 1 ng/ml) and anti-human CD28 (final concentration: 1 μg/ml) were added to make 200 μl/well. Then, plates were incubated at a 37° C., 5% CO₂ for 48 to 72 hours. The thus cultured cells were analyzed with FACS, and it was confirmed that more than 50% of the cells became Tfh-like cells (CXCR5⁺ICOS⁺PD-1⁺). THP-1 cell line (parental cell line or a cell line overexpressing human FcgγRIIB) was suspended in dilute solution of mitomycin C (500 μg/ml) at 1×10⁷ cells/ml, incubated at 37° C. for 2 hours and washed 3 times with a culture medium. The thus prepared activated human T cells or human Tfh-like cells were seeded in round bottom 96-well plates at 5×10⁴ cells/well and the THP-1 cells at 2.5×10⁴ cells/well. Further, as a stimulant, CytoStim (Miltenyi Biotec) was added at 0.2 μl/well and anti-human PD-1 antibodies or CTLA-4-Ig were added to give a final concentration of 5-5000 ng/ml. Then, plates were cultured at a 37° C., 5% CO₂ for 18 hours. After the culture, the supernatant was collected, and cytokine concentrations were measured using IFN-γ ELISA MAX Deluxe (BioLegend) and Human IL-21 Duoset ELISA (R&D).

Evaluation of PD-1 Agonist in the Autoantigen Response of PBMC from Autoimmune Disease Patients

[0148] RA or SLE patient-derived PBMC (Precision for Medicine, STEMCELL Technologies) was thawed, suspended in a medium at 1×10⁷ cells/2 ml and seeded in 12-well plates at 2 ml/well. After 16-24 hour preculture, cells were collected, stained with CFSE, suspended in a medium at 3×10⁶ cells/ml and seeded in round bottom 96-well plates at 100 μl/well. As antigens to these cells, citrullinated fibrinogen (Cayman) for RA patient-derived PBMC and Sm antigen (AROTEC DIAGNOSTICS) for SLE patient-derived PBMC were added at 50 μl/well to give final concentrations of 10 μg/ml and 5 μg/ml, respectively. Further, anti-human PD-1 antibodies or CTLA-4-Ig were added at 50 μl/well to give a final concentration of 5, 0.5, 0.05 or 0.005 μg/ml. After 6 to 7 days, proliferation of CD4⁺ T cells linked to CFSE as an indicator was evaluated with a flow cytometer. Further, IFN-γ concentration in the culture supernatant was measured with Human IFN-γ ELISA MAX Deluxe (BioLegend).

### Results and Discussion

[0149] There are anti-PD-1 antibodies which are claimed to suppress T cell activity by PD-1 agonist activity (Ref. 1). However, it has never been demonstrated if any anti-PD-1 antibodies can really stimulate PD-1. Preceding researches discuss T cell inhibition relying on an artificial system based on the effect of immobilized anti-PD-1 antibody on T cell stimulation with immobilized anti-CD38 antibody. However, such an artificial condition does not faithfully reproduce T cell activation in vivo. It is a different question whether the administration of anti-PD-1 antibody in a free form can suppress in vivo T cell activation in the interaction with antigen-presenting cells.

[0150] To find out anti-human PD-1 agonist antibody that functions under physiological conditions, an ideal evaluation system will be the one reproducing antigen-specific T cell activation by the interaction between T cells and antigen-presenting cells. In addition, a test system that permits easy modification of experimental conditions is useful for the analysis of the mechanism of action. A combination of established cell lines, DO11.10 T cell hybridoma and IIA1.6 cells as antigen-presenting cells, provides a useful platform, which enables antigen-specific T cell activation and the analysis of mechanism of action in an efficient and reproducible manner (FIG. 1). DO11.10 T cell hybridoma is a T cell hybridoma cell line which was originated from CD4⁺ T cells of DO11.10 mouse expressing MHC class II (I-A^{d})-restricted T cell receptor that recognizes an ovalbumin-derived peptide (OVA₃₂₃₋₃₃₉). DO11.10 T cell hybridoma produces IL-2 in response to the antigenic peptide presented on MHC class II (I-A^{d}) expressed on IIA1.6 cells (a B cell lymphoma cell line) (FIG. 1A). Since antigen-specific T cell activation is inducible in this combination of cells, this experimental system has a substantial advantage of reproducing physiological immune activation scheme, which is not available in experimental systems using non-specific T cell activators. Furthermore, the modification of the cells such as gene knock-out and overexpression can be easily done.

[0151] DO11.10 T cell hybridoma cells expressing human PD-1 were confirmed to clearly reduce IL-2 production upon antigen stimulation by PD-L1-expressing IIA1.6 cells in a PD-1-dependent mechanism (FIG. 1B). PD-1 and PD-L1 on the cell membrane should have a native protein conformation, which is also an advantage of this experimental system over artificial experimental systems using water-soluble fusion proteins of PD-1/PD-L1. Indeed, anti-human PD-1 antibody (EH12.2H7), an established blocking antibody, reversed the PD-L1-dependent suppression of IL-2, indicating that this experimental system can reliably detect blocking antibodies (FIG. 1C). The present inventors have concluded that this experimental system using cellular interaction is suitable combination for detecting PD-1-mediated T cell suppression and proceeded to characterize the binding domain of anti-human PD-1 antibodies with the agonist activity and to determine the specific conditions necessary for inducing agonistic activity.

[0152] To find and characterize biologically functional anti-human PD-1 antibodies, a number of monoclonal antibodies binding to various domains of human PD-1 were prepared. Hybridomas producing these antibodies were generated from human PD-1-immunized mice. The antibodies were classified by the binding specificity to the eight putative domains constituting the molecular surface of PD-1 that were selected based on the structure of human PD-1 (FIG. 2). The analysis of binding specificity confirmed that the antibody panel included a number of antibodies with various binding epitopes.

[0153] Next, the obtained antibodies were tested for the agonistic activity. The detection of immunosuppressive activity by anti-PD-1 agonist antibodies should be conducted in the absence of PD-L1-dependent immunosuppression. The screening system for agonistic antibodies is different from that for blocking antibody. This system involves a combination of human PD-1-expressing DO11.10 T cell hybridoma and IIA1.6 cells which were made to be lacking PD-L1 but expressing FcγRIIB. The present inventors evaluated the anti-human PD-1 antibody panel with a variety of binding epitopes as well as commercially available anti-human PD-1 monoclonal antibodies for biological activities using both screening systems for blocking antibodies and agonist antibodies. As a result, agonist antibodies and blocking antibodies with various degrees of activity were obtained (FIGS. 3 to 5). It was confirmed that these activities are not observed in the absence of PD-1. No antibody particularly possessed both agonist activity and blocking activity. Clone HM266, which is one of the strongest agonist antibodies, could suppress ERK phosphorylation occurring downstream in the stimulated DO11.10 cells, indicating the interruption of T cell receptor signaling (FIG. 22).

[0154] The biological activities were correlated with the binding site of antibodies, and agonist antibodies and blocking antibodies found clearly distinct binding sites (FIG. 5). Specifically, while agonist antibodies bound to domain #6 (SEQ ID NO: 8), domain #7 (SEQ ID NO: 9) or domain #8 (SEQ ID NO: 10) on the surface of human PD-1 molecule, blocking antibodies bound predominantly to domain #1 (SEQ ID NO: 3), domain #2 (SEQ ID NO: 4) or domain #5 (SEQ ID NO: 7). Agonist antibodies specifically binding to domain #7 exhibited strong activity. Included in this group are clones HM266, HM242, HM297 and HM268. The correlation between the agonistic activity and binding sites of human PD-1 molecule has never been reported in defining a group of anti-human PD-1 agonist antibodies.

[0155] Since the anti-human PD-1 agonist antibodies were selected in the experimental system involving antigen-specific T cell activation in the interaction with antigen-presenting cells, the immunosuppressive activity by the addition of free anti-human PD-1 antibody indicates its promise to function under physiological conditions. The current agonist antibodies did not affect PD-1-deficient T cells, clearly showing the PD-1-dependent immunosuppressive action. When anti-CD3 antibody was co-immobilized with anti-PD-1 as in the other studies, the immobilized amount of anti-CD3 antibody may substantially decrease due to some distraction by anti-PD-1 antibody used in combination. On such an occasion, apparent activation of T cells is suppressed, but this is caused by attenuation of stimulation from anti-CD3 antibody and what was observed is a non-specific phenomenon irrelevant to the function of anti-PD-1 antibody. Actually, the present inventors have also experienced such cases. To our experience, when this type of experimental system is to be used in PD-1 studies, it will be very important to pay attention to the immobilized amount of anti-CD3 antibody, and PD-1-dependent immunosuppression should be confirmed using PD-1 deficient T cells.

[0156] The anti-human PD-1 agonist antibodies shown by the present inventors suppress activated T cells in vitro, implying efficacy on a wide variety of inflammatory diseases. Activated T cells have been reported to be involved in various diseases in different organs and allergic diseases by type 1 hypersensitivity (Ref. 2). For example, it is known that the neutralization of activated T cell-derived cytokines decreases inflammatory responses in these disease (Ref. 3). Cancer patients under treatment with anti-PD-1 blocking antibody often experience symptoms similar to diseases with strong T cell involvement as adverse events (Ref. 4). In animal experiments, PD-1 induction is observed in T cell-dependent inflammation (Ref. 5), and PD-1-deficiency or PD-1 blockade result in exaggerated inflammation (Ref. 6), showing that PD-1 is very important for the regulation of activated T cells in pathological conditions. Therefore, therapeutic intervention targeting PD-1 is expected to suppress activated T cells involved in pathological conditions and has a potential to attenuate a wide spectrum of proinflammatory activities in various inflammatory diseases. Next, the present inventors examined the anti-inflammatory action of PD-1 agonist antibodies in multiple mouse inflammation models.

[0157] Anti-inflammatory property of PD-1 agonist antibody in vivo was tested using an animal experimental model of allergic asthma induced by inhalation of dust mite antigen. Preventive administration of anti-human PD-1 agonist antibody HM266 to human PD-1 knock-in mice reduced infiltration of eosinophils and CD4⁺ T cells into alveolar space and IL-4-, IL-5- and IL-13-producing CD4⁺ T cells (FIGS. 6 and 7). Corresponding to the decrease of Th2 cells, the blood concentration of mite antigen-specific IgE also decreased greatly, indicating the suppression of Th2-type immune response (FIG. 7). Importantly, HM266 treatment in therapeutic regimen could also suppress infiltration of eosinophils and Th2-type CD4⁺ T cells (FIGS. 6 and 7). These results indicate that T cell suppression by PD-1 agonists is useful as a preventive and a therapeutic strategy for allergic inflammation. Administration of J116, a weaker PD-1 agonist antibody than HM266, also significantly suppressed eosinophils infiltration into the alveolar space. J116 decreased the numbers of IL-5- and IL-13-producing cells, but it did not significantly reduce CD4⁺ T cell infiltration or IL-4-producing cells. (FIGS. 24 and 25). Since HM266 has a higher agonist activity than J116 (FIG. 23), the difference in the anti-inflammatory effect might reflect the potential as agonists, and HM266 is one of the excellent clones among the group of antibodies that bind to domain #7 of human PD-1.

[0158] The anti-inflammatory efficacy of anti-human PD-1 agonist antibodies was further examined in other T cell-mediated disease models such as multiple sclerosis model (EAE model), colitis model, acute GVHD and chronic GVHD (lupus-like) model. These disease models were induced by T cell transfer, and treatment with anti-human PD-1 agonist antibody started at the same time as T cell transfer. As a result, Encephalomyelitis score in EAE model was significantly reduced by HM266 treatment (FIG. 8). In colitis model, HM266 attenuated body weight loss, shortened colon length and infiltration of cytokine-producing CD4+ cells in the lamina propria (FIGS. 9 and 26). Additionally, in acute GVHD model, anti-human PD-1 agonist antibodies strongly suppressed acute GVHD symptoms as evidenced from the marked suppression of weight loss, donor-derived cell expansion in peripheral blood and organs and AST, ALT and IFN-γ levels in plasma. These anti-inflammatory effects were consistent in anti-human PD-1 agonist antibodies: HM266, HM242, HM268 and HM297 (FIGS. 10 and 27). Moreover, anti-human PD-1 agonist antibody blocked the induction of autoantibodies and increases of Tfh cells and antibody-producing B cells involved in autoantibody production in the chronic GVHD (lupus-like) model (FIGS. 8-11 and 29). This result indicates the efficacy of anti-human PD-1 agonist antibodies on T cell-dependent antibody production.

[0159] The consistent anti-inflammatory action of anti-human PD-1 agonist antibodies in multiple T cell-mediated disease models suggested that these antibodies in present invention are useful as a therapeutic strategy for a wide range of inflammatory diseases. Neutralizing antibodies against T cell-derived cytokines that have already been in clinical use may require continuous treatment in order to sustain anti-inflammatory effects; however, anti-human PD-1 agonist antibody may be able to achieve long-term suppression of T cells and to cure of diseases. Specifically, the remarkable suppression of CD8⁺ T cells in acute GVHD model suggests that anti-human PD-1 agonist antibodies will be effective as therapeutics for GVHD and alopecia areata in which CD8⁺ T cells is mainly involved. Since these antibodies could suppress CD4⁺ T cells in asthma, colitis and EAE models, anti-human PD-1 agonist antibodies will be applicable as therapeutics for allergic disorders, colitis, multiple sclerosis, as well as psoriasis, in all of which CD4⁺ T cells play an important role. The blockade of autoantibodies in the lupus-like model suggests that anti-PD-1 agonist antibodies are applicable as therapeutics for diseases involving autoantibody, as exemplified by lupus nephritis and rheumatoid arthritis.

[0160] The present inventors converted the anti-human PD-1 agonist antibodies into humanized antibodies in order to enable application in humans. The seven anti-human PD-1 agonist antibodies that are originally mouse IgG were converted to chimeric antibodies by replacing the sequences of Fc regions to those of human IgG1-K322A. The agonistic activity of the resultant chimeric antibodies was evaluated using human PD-1-expressing cell lines and human FcγRIIB-expressing cell lines, and all the chimeric antibodies showed an activity comparable to that of the original mouse IgG (FIG. 12). Among these seven antibodies, three antibodies with a relatively superior stability were selected. Next, the Fv region of these antibodies were converted to human sequences. For each antibody, 12 or 15 patterns of humanized Fv were created and combined with the constant region of human IgG1-K322A. All the twelve variants derived from HM242 maintained a high PD-1 agonist activity and most of them were also excellent in stability. With respect to 15 variants derived from HM297 and 12 variants from HM268, despite being humanized same as HM242, some of them unexpectedly became inferior to their original form in terms of agonistic activity and stability. Among these humanized antibodies, four humanized antibodies were chosen as antibodies with excellent agonist activity and stability (FIG. 13, Tables 1 to 3).

[0161] These humanized antibodies were tested for the immunosuppressive activity in primary human lymphocytes. Human peripheral blood mononuclear cell-derived CD4⁺ T cells were mixed with B cells from other individual, and the extent of allogenic T cell activation was compared. While CTLA-4-Ig inhibited T cell response, none of these four anti-human PD-1 agonist antibodies showed a significant suppressive activity (FIG. 14).

[0162] To solve this problem, the present inventors sought to modify the humanized anti-human PD-1 agonist antibodies. Some agonist antibodies require antibody crosslinking to exert their agonistic activity, and Fc receptors play an important role as a means of antibody crosslinking. However, no one has addressed whether Fc receptor-dependent crosslinking is required for the activity of anti-human PD-1 agonist antibodies. In the validation by the present inventors, anti-human PD-1 agonist antibodies failed to exert agonist activity in the absence of Fc receptors. In contrast, in the presence of Fc receptors, anti-human PD-1 agonist antibodies exerted agonistic activity, and FcγRIIB was the most effective for the activity exerted by the anti-human PD-1 agonist antibody among several existing human Fc receptors (FIGS. 15 and 16). Although immunosuppressive activity can also be induced by FcγRIIA(H131) or FcγRIIA(R131), the intensity was inferior compared to FcγRIIB, and FcγRIIIA(F158) or FcγRIIIA(V158) was even weaker. Unexpectedly, cytokine production rather increased when FcγRIA-expressing antigen presenting cells were used to attach anti-PD-1 antibodies.

[0163] The agonistic activity of humanized anti-human PD-1 agonist antibody increases dependent on the human FcγRIIB levels on the antigen-presenting cells (FIG. 16). A high immunosuppressive activity emerged when antigen-presenting cells express FcγRIIB at high levels, whereas only marginal immunosuppressive activity was observed when FcγRIIB levels were low. In this sense, it suggested that the agonist antibodies in the present invention might be optimized to increase their binding to human FcγRIIB to exert immunosuppression through low levels of human FcγRIIB as found in actual human lymphocytes. This problem, or solution for the problem, could not be found in the test system (antibody immobilization) employed by others in previously reported anti-PD-1 agonist antibodies. This is a finding that guarantees the inventive step of the present invention.

[0164] Then, the present inventors sought to increase the affinity of agonist antibodies to human FcγRIIB. Briefly, by introducing amino acid modifications into the Fc region and so on, the inventors have found combinations of modifications which can selectively improve the affinity to FcγRIIB. These modified Fc regions were attached to anti-human PD-1 agonist antibodies to produce chimeric antibodies. The resultant chimeric antibodies demonstrated the enhanced agonistic activities even under conditions of low expression of FcγRIIB, and they showed an improved immunosuppressive activity in primary human cells (FIGS. 17, 18, 30, 35 and 37). The humanized antibodies with these Fc modifications were confirmed to have a more potent efficacy than CTLA-4-Ig in the suppression of human T cells activation (FIGS. 19 and 38). These results show that Fc-modified anti-human PD-1 agonist antibodies in the present invention are capable of exerting a potent immunosuppressive action in a condition with physiological expression levels of PD-1 and FcγRIIB.

[0165] Some of the Fc variants not only promoted PD-1 agonist activity via improved FcγRIIB affinity but also increased affinity to FcγRIIIA, which is responsible for the FcγRIIIA-mediated ADCC activity (FIGS. 20, 31, 36 and 39). These antibodies, compared to those having low affinity to FcγRIIIA, showed higher T cell-suppressive activity in the assay system in which human PBMC was stimulated with antigen (FIGS. 21, 32 and 40). The overall immunosuppressive activity of anti-PD-1 agonist antibodies may be further improved by the addition of ADCC activity eliminating PD-1-expressing cells.

[0166] So far, for cell surface molecules such as TNF receptor superfamily, some antibodies targeting these cell surface molecules were known to exert agonistic activity in an FcγRIIB-dependent manner (Ref. 7). These agonist antibodies trigger the signal transduction through TRAFs (TNF receptor-associated factors), it is downstream of target molecules, and so on as a result of the binding to FcγRIIB and the crosslinking of target molecules (Ref. 8). Conversely, PD-1 has an immunoinhibitory domain (ITIM/ITSM) in its intracellular domain, recruits phosphatase SHP-1/2, and dephosphorylates various immune activation signaling molecules, thereby causing immunosuppression (Ref. 9). The agonistic signal transduction by the anti-human PD-1 antibody related to the present invention is completely different from signal transduction by known antibodies in terms of the molecular species and the intracellular signaling mode. Indeed, the FcγRIIB-dependency of the agonist antibodies to the molecules of the immunoglobulin superfamily; to which the anti-PD-1 agonist antibody belongs has never been reported before, and it is unpredictable that anti-human PD-1 agonist antibodies in the present invention show the same characters as known antibodies as above. Furthermore, it is also unpredictable that the agonistic activity of anti-human PD-1 antibodies emerges only when the antibody has bound to the specific domain of human PD-1.

[0167] Anti-CD40 antibody, one of the agonist antibodies to the above-described TNF receptor family, has proceeded to clinical trial; however, the therapeutic outcome was not as remarkable as the efficacy shown in mouse models (Ref. 10). In this report, they speculate that Fc modification to increase the binding of the antibodies to FcγRIIB may improve the clinical response in humans. However, with respect to the anti-PD-1 agonist antibody, the dependence on FcγRIIB has not previously reported in the first place and the necessity of high affinity of anti-PD-1 agonist antibody to FcγRIIB has never been known at all. The novel ideas by the present inventors of enhancing the affinity of anti-human PD-1 agonist antibodies for FcγRIIB enables the antibodies in the present invention to exert adequate PD-1 agonistic activity and achieve immunosuppressive treatment of inflammatory diseases even in the human physiological condition with low FcγRIIB expression level. Further, it has not known before that the Fc modification to enhance ADCC activity further improves the immunosuppressive effect of anti-human PD-1 agonist antibodies. The enhancement of PD-1 agonist activity, together with ADCC activity, by the modification of Fc region produce potent immunosuppressive anti-human PD-1 antibodies compared to pre-existing anti-human PD-1 antibodies, thus showing the inventive step of the antibody of the present invention.

TABLE 1
Activity/Property Profile of Humanized HM242
Activity and Property of Humanized HM242

| | | | | | Cell-cell | | | |
|---|---|---|---|---|---|---|---|---|
| | | | | Monomer | contact | SPR(PD-1) | DSC | Identical |
| | | | Productivity | ratio(%)_Gel | assay | K_{D} | Tm2 | with human |
| VH | VL | Sample | (mg/l) | filtration | (ng/ml) | (M) | (° C.)_Fab | sequence(%) |
| mouse | | HM242- | n.d. | 78.3 | 13.7 | <5.105E−11 | 78.9 | 91% |
| | | IgG1-K322A | | | | | | |
| A | 1 | HM242-A1 | 352 | 88.5 | 13.1 | <3.561E−11 | 82.5 | 94% |
| | 2 | HM242-A2 | 97 | 93.4 | 16.7 | <4.080E−11 | 87.2 | 95% |
| | 3 | HM242-A3 | 252 | 95.1 | 18.8 | <2.172E−11 | 90.2 | 96% |
| B | 1 | HM242-B1 | 216 | 91.4 | 7.15 | <4.482E−11 | 82.2 | 95% |
| | 2 | HM242-B2 | 91 | 100.0 | 8.83 | <3.153E−11 | 85.9 | 96% |
| | 3 | HM242-B3 | 141 | 100.0 | 20.8 | <3.072E−11 | 87.1 | 97% |
| C | 1 | HM242-C1 | 485 | 94.5 | 19.0 | <1.786E−11 | 82.7 | 95% |
| | 2 | HM242-C2 | 187 | 73.9 | 18.1 | <2.107E−11 | 88.3 | 96% |
| | 3 | HM242-C3 | 409 | 96.0 | 23.7 | <1.861E−11 | 91.8 | 97% |
| D | 1 | HM242-D1 | 485 | 95.4 | 24.8 | 1.03E−10 | 82.1 | 95% |
| | 2 | HM242-D2 | 158 | 86.8 | 33.3 | <6.031E−11 | 87.7 | 96% |
| | 3 | HM242-D3 | 368 | 95.7 | 31.5 | <4.924E−11 | 92.4 | 97% |

(n.d. = not determined)

TABLE 2
Activity/Property Profile of Humanized HM297
Activity and Property of Humanized HM297

| | | | | | Cell-cell | | | |
|---|---|---|---|---|---|---|---|---|
| | | | | Monomer | contact | SPR(PD-1) | DSC | Identical |
| | | | Productivity | ratio(%)_Gel | assay | K_{D} | Tm2 | with human |
| VH | VL | Sample | (mg/l) | filtration | (ng/ml) | (M) | (° C.)_Fab | sequence(%) |
| mouse | | HM297- | n.d. | 95.7 | 78.3 | 4.932E−11 | 78.21 | 92% |
| | | IgG1-K322A | | | | | | |
| E | 4 | HM297-E4 | 311 | 85.70 | 100 | 1.293E−10 | 80.18 | 94% |
| | 5 | HM297-E5 | 614 | 94.12 | 78.6 | 5.022E−08 | 83.35 | 94% |
| | 6 | HM297-E6 | 508 | 94.02 | 65.4 | 1.259E−08 | 84.47 | 95% |
| F | 4 | HM297-F4 | 736 | 87.84 | 92.3 | 2.412E−08 | 80.82 | 94% |
| | 5 | HM297-F5 | 555 | 85.39 | 98.9 | 2.349E−09 | 85.40 | 95% |
| | 6 | HM297-F6 | 447 | 84.72 | 150 | 4.825E−09 | 86.45 | 96% |
| G | 4 | HM297-G4 | 449 | 84.23 | 55.4 | 4.507E−10 | 80.39 | 94% |
| | 5 | HM297-G5 | 276 | 85.78 | 102 | 2.319E−10 | 82.62 | 95% |
| | 6 | HM297-G6 | 350 | 79.17 | 59.7 | 1.892E−09 | 82.61 | 96% |
| H | 4 | HM297-H4 | 740 | 89.90 | 185 | 2.206E−10 | 80.99 | 95% |
| | 5 | HM297-H5 | 728 | 90.72 | 96.4 | 5.630E−10 | 84.98 | 95% |
| | 6 | HM297-H6 | 757 | 86.03 | 141 | 1.860E−09 | 85.71 | 96% |
| I | 4 | HM297-I4 | 686 | 90.07 | 65.6 | 4.844E−09 | 82.61 | 95% |
| | 5 | HM297-I5 | 538 | 90.11 | 94.9 | 2.200E−09 | 86.13 | 95% |
| | 6 | HM297-I6 | 558 | 88.57 | 137 | 3.479E−09 | 86.83 | 96% |

(n.d. = not determined)

TABLE 3
Activity/Property Profile of Humanized HM268
Activity and Property of Humanized HM268

| | | | | | Cell-cell | | | |
|---|---|---|---|---|---|---|---|---|
| | | | | Monomer | contact | SPR(PD-1) | DSC | Identical |
| | | | Productivity | ratio(%)_Gel | assay | K_{D} | Tm2 | with human |
| VH | VL | Sample | (mg/l) | filtration | (ng/ml) | (M) | (° C.)_Fab | sequence(%) |
| mouse | | HM268- | n.d. | 94.9 | 46.5 | <1.694E−12 | 70.4 | 91% |
| | | IgG1-K322A | | | | | | |
| J | 1 | HM268-J7 | 332 | 100.0 | 70.9 | 4.816E−12 | 80.4 | 95% |
| | 8 | HM268-J8 | 639 | 99.1 | 63.1 | <2.837E−12 | 82.5 | 96% |
| | 9 | HM268-J9 | 201 | 97.3 | 301 | 2.524E−11 | 81.4 | 97% |
| K | 7 | HM268-K7 | 473 | 76.4 | 43.7 | 6.906E−12 | 80.6 | 95% |
| | 8 | HM268-K8 | 905 | 91.8 | 39.4 | <3.062E−12 | 86.9 | 96% |
| | 9 | HM268-K9 | 366 | 65.3 | 150 | 1.511E−10 | 87.5 | 97% |
| L | 7 | HM268-L7 | 369 | 98.0 | 103 | 2.161E−12 | 82.0 | 96% |
| | 8 | HM268-L8 | 701 | 99.1 | 98.2 | 1.291E−12 | 87.2 | 96% |
| | 9 | HM268-L9 | 612 | 87.1 | 87.4 | 1.105E−11 | 87.1 | 97% |
| M | 7 | HM268-M7 | 401 | 83.7 | 149 | 1.199E−11 | 82.5 | 96% |
| | 8 | HM268-M8 | 521 | 93.0 | 75.8 | 3.588E−12 | 87.4 | 97% |
| | 9 | HM268-M9 | 295 | 66.5 | 1.43E+03 | 6.143E−11 | 88.3 | 97% |

(n.d. = not determined)

### REFERENCES

[0168] Ref. 1
[0169] Japanese Patent No. 6174321
[0170] WO 2017/058859
[0171] WO 2018/053405
[0172] WO 2018/183459
[0173] Japanese Patent No. 4511943
[0174] WO 2019/168745
[0175] WO 2018/226580
[0176] WO 2019/156199
[0177] WO 2019/219709
[0178] WO 2020/247648
[0179] Bennett F, Luxenberg D, Ling V, Wang I M, Marquette K, Lowe D, Khan N, Veldman G, Jacobs K A, Valge-Archer V E, Collins M, Carreno B M. Program Death-1 Engagement Upon TCR Activation Has Distinct Effects on Costimulation and Cytokine-Driven Proliferation: Attenuation of ICOS, IL-4, and IL-21, But Not CD28, IL-7, and IL-15 Responses. J Immunol. 170:711-718 (2003).
[0180] Ref 2
[0181] Hirahara K, Nakayama T. CD4+ T-cell subsets in inflammatory diseases: beyond the Th1/Th2 paradigm. Int Immunol. 28:163-171 (2016).
[0182] Noda S, Krueger J G, Guttman-Yassky E. The translational revolution and use of biologics in patients with inflammatory skin diseases. J Allergy Clin Immunol. 135:324-336 (2015).
[0183] Ref. 3
[0184] Simpson E L, Bieber T, Guttman-Yassky E, Beck L A, Blauvelt A, Cork M J, Silverberg J I, Deleuran M, Kataoka Y, Lacour J P, Kingo K, Worm M, Poulin Y, Wollenberg A, Soo Y, Graham N M, Pirozzi G, Akinlade B, Staudinger H, Mastey V, Eckert L, Gadkari A, Stahl N, Yancopoulos G D, Ardeleanu M; SOLO 1 and SOLO 2 Investigators. Two Phase 3 Trials of Dupilumab versus Placebo in Atopic Dermatitis. N Engl J Med. 375:2335-2348 (2016).
[0185] Langley R G, Elewski B E, Lebwohl M, Reich K, Griffiths C E, Papp K, Puig L, Nakagawa H, Spelman L, Sigurgeirsson B, Rivas E, Tsai T F, Wasel N, Tyring S, Salko T, Hampele I, Notter M, Karpov A, Helou S, Papavassilis C; ERASURE Study Group; FIXTURE Study Group.
[0186] Secukinumab in plaque psoriasis—results of two phase 3 trials. N Engl J Med. 371:326-38 (2014).
[0187] Ref 4
[0188] Rosskopf S, Jahn-Schmid B, Schmetterer K G, Zlabinger G J, Steinberger P. PD-1 has a unique capacity to inhibit allergen-specific human CD4+ T cell responses. Sci Rep. 8:13543 (2018).
[0189] Bottlaender L, Amini-Adle M, Maucort-Boulch D, Robinson P, Thomas L, Dalle S. Cutaneous adverse events: a predictor of tumour response under anti-PD-1 therapy for metastatic melanoma, a cohort analysis of 189 patients. J Eur Acad Dermatol Venereol. 34:2096-2105 (2020).
[0190] Ref 5
[0191] Liang S C, Latchman Y E, Buhlmann J E, Tomczak M F, Horwitz B H, Freeman G J, Sharpe A H. Regulation of PD-1, P D-L1, and P D-L2 expression during normal and autoimmune responses. Eur J Immunol. 33:2706-16 (2003).
[0192] Ref 6
[0193] Nishimura H, Nose M, Hiai H, Minato N, Honjo T. Development of lupus-like autoimmune diseases by disruption of the PD-1 gene encoding an ITIM motif-carrying immunoreceptor. Immunity. 11:141-51 (1999).
[0194] Wang J, Yoshida T, Nakaki F, Hiai H, Okazaki T, Honjo T. Establishment of NOD-Pdcd1/mice as an efficient animal model of type I diabetes. Proc. Natl Acad. Sci. USA. 102:11823-8 (2005).
[0195] Ansari M J, Salama A D, Chitnis T, Smith R N, Yagita H, Akiba H, Yamazaki T, Azuma M, Iwai H, Khoury S J, Auchincloss H Jr, Sayegh M H. The programmed death-1 (PD-1) pathway regulates autoimmune diabetes in nonobese diabetic (NOD) mice. J Exp Med. 198:63-9 (2003).
[0196] Nishimura H, Okazaki T, Tanaka Y, Nakatani K, Hara M, Matsumori A, Sasayama S, Mizoguchi A, Hiai H, Minato N, Honjo T. Autoimmune dilated cardiomyopathy in PD-1 receptor-deficient mice. Science. 291:319-22 (2001).
[0197] Okazaki T, Tanaka Y, Nishio R, Mitsuiye T, Mizoguchi A, Wang J, Ishida M, Hiai H, Matsumori A, Minato N, Honjo T. Autoantibodies against cardiac troponin I are responsible for dilated cardiomyopathy in PD-1-deficient mice. Nat Med. 9:1477-83 (2003).
[0198] Okazaki T, Honjo T. Pathogenic roles of cardiac autoantibodies in dilated cardiomyopathy. Trends Mol Med. 11:322-6 (2005).
[0199] Tsushima F, Iwai H, Otsuki N, Abe M, Hirose S, Yamazaki T, Akiba H, Yagita H, Takahashi Y, Omura K, Okumura K, Azuma M. Preferential contribution of B7-H1 to programmed death-1-mediated regulation of hapten-specific allergic inflammatory responses. Eur J Immunol. 33:2773-82 (2003).
[0200] Tanaka R, Ichimura Y, Kubota N, Saito A, Nakamura Y, Ishitsuka Y, Watanabe R, Fujisawa Y, Kanzaki M, Mizuno S, Takahashi S, Fujimoto M, Okiyama N. Activation of CD8 T cells accelerates anti-PD-1 antibody-induced psoriasis-like dermatitis through IL-6. Commun Biol. 3:571 (2020).
[0201] Ref 7
[0202] Li F, Ravetch J V. Inhibitory Fcγ receptor engagement drives adjuvant and anti-tumor activities of agonistic CD40 antibodies. Science. 333:1030-4 (2011).
[0203] White A L, Chan H T, Roghanian A, French R R, Mockridge C I, Tutt A L, Dixon S V, Ajona D, Verbeek J S, Al-Shamkhani A, Cragg M S, Beers S A, Glennie M J. Interaction with FcγRIIB is critical for the agonistic activity of anti-CD40 monoclonal antibody. J Immunol. 187:1754-63 (2011).
[0204] Wilson N S, Yang B, Yang A, Loeser S, Marsters S, Lawrence D, Li Y, Pitti R, Totpal K, Yee S, Ross S, Vernes J M, Lu Y, Adams C, Offringa R, Kelley B, Hymowitz S, Daniel D, Meng G, Ashkenazi A. An Fcγ receptor-dependent mechanism drives antibody-mediated target-receptor signaling in cancer cells. Cancer Cell. 19:101-13 (2011).
[0205] Li F, Ravetch J V. Apoptotic and antitumor activity of death receptor antibodies require inhibitory Fcγ receptor engagement. Proc Natl Acad Sci USA. 109:10966-71 (2012). Ref. 8
[0206] Elgueta R, Benson M J, de Vries V C, Wasiuk A, Guo Y, Noelle R J. Molecular mechanism and function of CD40/CD40L engagement in the immune system. Immunol Rev. 229:152-72 (2009).
[0207] Ref 9
[0208] Okazaki T, Maeda A, Nishimura H, Kurosaki T, Honjo T. PD-1 immunoreceptor inhibits B cell receptor-mediated signaling by recruiting src homology 2-domain-containing tyrosine phosphatase 2 to phosphotyrosine. Proc Natl Acad Sci USA. 98:13866-13871(2001).
[0209] Sheppard K A, Fitz L J, Lee J M, Benander C, George J A, Wooters J, Qiu Y, Jussif J M, Carter L L, Wood C R, Chaudhary D. PD-1 inhibits T-cell receptor induced phosphorylation of the ZAP70/CD3zeta signalosome and downstream signaling to PKCtheta. FEBS Lett. 574:37-41 (2004).
[0210] Yokosuka T, Takamatsu M, Kobayashi-Imanishi W, Hashimoto-Tane A, Azuma M, Saito T. Programmed cell death 1 forms negative costimulatory microclusters that directly inhibit T cell receptor signaling by recruiting phosphatase SHP2. J Exp Med. 209:1201-1217 (2012).
[0211] Ref. 10
[0212] Dahan R, Barnhart B C, Li F, Yamniuk A P, Korman A J, Ravetch J V. Therapeutic activity of agonistic, human anti-CD40 monoclonal Abs requires selective FcγR-engagement. Cancer Cell. 29(6): 820-831 (2016).

[0213] All publications, patents and patent applications cited herein are incorporated herein by reference in their entirety.

### INDUSTRIAL APPLICABILITY

[0214] The present invention is applicable to treatment and/or prevention of inflammatory diseases.

SEQUENCE LISTING FREE TEXT

| Seq. ID | Seq. name |
|---|---|
| 1 | humam PD-1 Amino Acid Sequence |
| 2 | mouse PD-1 Amino Acid Sequence |
| 3 | epitope/binding Region #1 of humam PD-1 |
| 4 | epitope/binding Region #2 of humam PD-1 |
| 5 | epitope/binding Region #3 of humam PD-1 |
| 6 | epitope/binding Region #4 of humam PD-1 |
| 7 | epitope/binding Region #5 of humam PD-1 |
| 8 | epitope/binding Region #6 of humam PD-1 |
| 9 | epitope/binding Region #7 of humam PD-1 |
| 10 | epitope/binding Region #8 of humam PD-1 |
| 11 | human FcgRIA Amino Acid Sequence |
| 12 | human FcgRIIA(H131) Amino Acid Sequence |
| 13 | human FcgRIIA(R131) Amino Acid Sequence |
| 14 | human FcgRIIB Amino Acid Sequence |
| 15 | human FcgRIIIA(F158) Amino Acid Sequence |
| 16 | human FcgRIIIA(V158) Amino Acid Sequence |
| 17 | mouse HM242 VH Region Amino Acid Sequence |
| 18 | humanized VH ver.A (HM242) Amino Acid Sequence |
| 19 | humanized VH ver.B (HM242) Amino Acid Sequence |
| 20 | humanized VH ver.C (HM242) Amino Acid Sequence |
| 21 | humanized VH ver.D (HM242) Amino Acid Sequence |
| 22 | mouse HM297 VH Region Amino Acid Sequence |
| 23 | humanized VH ver.E (HM297) Amino Acid Sequence |
| 24 | humanized VH ver.F (HM297) Amino Acid Sequence |
| 25 | humanized VH ver.G (HM297) Amino Acid Sequence |
| 26 | humanized VH ver.H (HM297) Amino Acid Sequence |
| 27 | humanized VH ver.I (HM297) Amino Acid Sequence |
| 28 | mouse HM268 VH Region Amino Acid Sequence |
| 29 | humanized VH ver.J (HM268) Amino Acid Sequence |
| 30 | humanized VH ver.K (HM268) Amino Acid Sequence |
| 31 | humanized VH ver.L (HM268) Amino Acid Sequence |
| 32 | humanized VH ver.M (HM268) Amino Acid Sequence |
| 33 | mouse HM266 VH Region Amino Acid Sequence |
| 34 | mouse HM242 VL Region Amino Acid Sequence |
| 35 | humanized VL ver.1 (HM242) Amino Acid Sequence |
| 36 | humanized VL ver.2 (HM242) Amino Acid Sequence |
| 37 | humanized VL ver.3 (HM242) Amino Acid Sequence |
| 38 | mouse HM297 VL Region Amino Acid Sequence |
| 39 | humanized VL ver.4 (HM297) Amino Acid Sequence |
| 40 | humanized VL ver.5 (HM297) Amino Acid Sequence |
| 41 | humanized VL ver.6 (HM297) Amino Acid Sequence |
| 42 | mouse HM268 VL Region Amino Acid Sequence |
| 43 | humanized VL ver.7 (HM268) Amino Acid Sequence |
| 44 | humanized VL ver.8 (HM268) Amino Acid Sequence |
| 45 | humanized VL ver.9 (HM268) Amino Acid Sequence |
| 46 | mouse HM266 VL Region Amino Acid Sequence |
| 47 | human IgG1 WT Fc Region Amino Acid Sequence |
| 48 | human IgG1 Fc_K322A Amino Acid Sequence |
| 49 | human IgG1 Fc_G236D/H268D(X2) Amino Acid Sequence |
| 50 | human IgG1 Fc_G236D/H268D/K322A(X2-K) Amino Acid Sequence |
| 51 | human IgG1 Fc_G236D/H268D/E293A/K322A(X2-KE) Amino Acid Sequence |
| 52 | human IgG1 Fc_S236D/S267G/H268D/K322A(X2-KS) Amino Acid Sequence |
| 53 | human IgG1 Fc_S239D/H268D(X3) Amino Acid Sequence |
| 54 | human IgG1 Fc_S239D/H268D/K322A(X3-K) Amino Acid Sequence |
| 55 | human IgG1 Fc_S239D/H268D/E293A/K322A(X3-KE) Amino Acid Sequence |
| 56 | human IgG1 Fc_S239D/H268D/K322A/I332E(X3-KI) Amino Acid Sequence |
| 57 | human IgG1 Fc_S239D/H268D/L328Y/K322A(X3-KL) Amino Acid Sequence |
| 58 | human IgG1 Fc_S239D/S267G/H268D/K322A(X3-KS) Amino Acid Sequence |
| 59 | human IgG1 Fc_S239D/S267G/H268D/K322A/I332E(X3-KSI) Amino Acid Sequence |
| 60 | human IgG1 Fc_S239D/S267G/H268D/L328Y/K322A(X3-KSL) Amino Acid Sequence |
| 61 | human IgG1 Fc_S239D/H268D/L328Y/I332E(X4) Amino Acid Sequence |
| 62 | human IgG1 Fc_S239D/H268D/K322A/L328Y/I332E(X4-K) Amino Acid Sequence |
| 63 | human IgG1 Fc_S239D/S267G/H268D/K322A/L328Y/I332E(X4-KS) Amino Acid Sequence |
| 64 | human IgG4 Fc Amino Acid Sequence |
| 65 | human IgG4 Fc_S228P Amino Acid Sequence |
| 66 | human IgG4 Fc_S228P/G236D/Q268D(X2-P) Amino Acid Sequence |
| 67 | human IgG4 Fc_S228P/S239D/Q268D(X3-P) Amino Acid Sequence |
| 68 | human IgG4 Fc_S228P/S239D/Q268D/L328Y/I332E(X4-P) Amino Acid Sequence |
| 69 | mouse HM242 Heavy Chain Amino Acid Sequence |
| 70 | mouse HM242 Heavy Chain DNA Sequence |
| 71 | mouse HM242 Light Chain Amino Acid Sequence |
| 72 | mouse HM242 Light Chain DNA Sequence |
| 73 | mouse HM266 Heavy Chain Amino Acid Sequence |
| 74 | mouse HM266 Heavy Chain DNA Sequence |
| 75 | mouse HM266 Light Chain Amino Acid Sequence |
| 76 | mouse HM266 Light Chain DNA Sequence |
| 77 | mouse HM268 Heavy Chain Amino Acid Sequence |
| 78 | mouse HM268 Heavy Chain DNA Sequence |
| 79 | mouse HM268 Light Chain Amino Acid Sequence |
| 80 | mouse HM268 Light Chain DNA Sequence |
| 81 | mouse HM297 Heavy Chain Amino Acid Sequence |
| 82 | mouse HM297 Heavy Chain DNA Sequence |
| 83 | mouse HM297 Light Chain Amino Acid Sequence |
| 84 | mouse HM297 Light Chain DNA Sequence |
| 85 | chimeric HM242-IgG1-K322A Heavy Chain Amino Acid Sequence |
| 86 | chimeric HM242-IgG1-K322A Heavy Chain DNA Sequence |
| 87 | chimeric HM242-IgG1-K322A Light Chain Amino Acid Sequence |
| 88 | chimeric HM242-IgG1-K322A Light Chain DNA Sequence |
| 89 | chimeric HM266-IgG1-K322A Heavy Chain Amino Acid Sequence |
| 90 | chimeric HM266-IgG1-K322A Heavy Chain DNA Sequence |
| 91 | chimeric HM266-IgG1-K322A Light Chain Amino Acid Sequence |
| 92 | chimeric HM266-IgG1-K322A Light Chain DNA Sequence |
| 93 | chimeric HM268-IgG1-K322A Heavy Chain Amino Acid Sequence |
| 94 | chimeric HM268-lgG1-K322A Heavy Chain DNA Sequence |
| 95 | chimeric HM268-IgG1-K322A Light Chain Amino Acid Sequence |
| 96 | chimeric HM268-IgG1-K322A Light Chain DNA Sequence |
| 97 | chimeric HM297-IgG1-K322A Heavy Chain Amino Acid Sequence |
| 98 | chimeric HM297-IgG1-K322A Heavy Chain DNA Sequence |
| 99 | chimeric HM297-IgG1-K322A Light Chain Amino Acid Sequence |
| 100 | chimeric HM297-IgG1-K322A Light Chain DNA Sequence |
| 101 | chimeric HM624-IgG1-K322A Heavy Chain Amino Acid Sequence |
| 102 | chimeric HM624-IgG1-K322A Heavy Chain DNA Sequence |
| 103 | chimeric HM624-IgG1-K322A Light Chain Amino Acid Sequence |
| 104 | chimeric HM624-IgG1-K322A Light Chain DNA Sequence |
| 105 | chimeric HM647-IgG1-K322A Heavy Chain Amino Acid Sequence |
| 106 | chimeric HM647-IgG1-K322A Heavy Chain DNA Sequence |
| 107 | chimeric HM647-IgG1-K322A Light Chain Amino Acid Sequence |
| 108 | chimeric HM647-IgG1-K322A Light Chain DNA Sequence |
| 109 | chimeric HM698-IgG1-K322A Heavy Chain Amino Acid Sequence |
| 110 | chimeric HM698-IgG1-K322A Heavy Chain DNA Sequence |
| 111 | chimeric HM698-IgG1-K322A Light Chain Amino Acid Sequence |
| 112 | chimeric HM698-IgG1-K322A Light Chain DNA Sequence |
| 113 | chimeric HM266-X2 Heavy Chain Amino Acid Sequence |
| 114 | chimeric HM266-X2 Heavy Chain DNA Sequence |
| 115 | chimeric HM266-X2 Light Chain Amino Acid Sequence |
| 116 | chimeric HM266-X2 Light Chain DNA Sequence |
| 117 | chimeric HM266-X2-K Heavy Chain Amino Acid Sequence |
| 118 | chimeric HM266-X2-K Heavy Chain DNA Sequence |
| 119 | chimeric HM266-X2-K Light Chain Amino Acid Sequence |
| 120 | chimeric HM266-X2-K Light Chain DNA Sequence |
| 121 | chimeric HM266-X2-KE Heavy Chain Amino Acid Sequence |
| 122 | chimeric HM266-X2-KE Heavy Chain DNA Sequence |
| 123 | chimeric HM266-X2-KE Light Chain Amino Acid Sequence |
| 124 | chimeric HM266-X2-KE Light Chain DNA Sequence |
| 125 | chimeric HM266-X2-KS Heavy Chain Amino Acid Sequence |
| 126 | chimeric HM266-X2-KS Heavy Chain DNA Sequence |
| 127 | chimeric HM266-X2-KS Light Chain Amino Acid Sequence |
| 128 | chimeric HM266-X2-KS Light Chain DNA Sequence |
| 129 | chimeric HM266-X3 Heavy Chain Amino Acid Sequence |
| 130 | chimeric HM266-X3 Heavy Chain DNA Sequence |
| 131 | chimeric HM266-X3 Light Chain Amino Acid Sequence |
| 132 | chimeric HM266-X3 Light Chain DNA Sequence |
| 133 | chimeric HM266-X3-K Heavy Chain Amino Acid Sequence |
| 134 | chimeric HM266-X3-K Heavy Chain DNA Sequence |
| 135 | chimeric HM266-X3-K Light Chain Amino Acid Sequence |
| 136 | chimeric HM266-X3-K Light Chain DNA Sequence |
| 137 | chimeric HM266-X3-KE Heavy Chain Amino Acid Sequence |
| 138 | chimeric HM266-X3-KE Heavy Chain DNA Sequence |
| 139 | chimeric HM266-X3-KE Light Chain Amino Acid Sequence |
| 140 | chimeric HM266-X3-KE Light Chain DNA Sequence |
| 141 | chimeric HM266-X3-KS Heavy Chain Amino Acid Sequence |
| 142 | chimeric HM266-X3-KS Heavy Chain DNA Sequence |
| 143 | chimeric HM266-X3-KS Light Chain Amino Acid Sequence |
| 144 | chimeric HM266-X3-KS Light Chain DNA Sequence |
| 145 | chimeric HM266-X4 Heavy Chain Amino Acid Sequence |
| 146 | chimeric HM266-X4 Heavy Chain DNA Sequence |
| 147 | chimeric HM266-X4 Light Chain Amino Acid Sequence |
| 148 | chimeric HM266-X4 Light Chain DNA Sequence |
| 149 | chimeric HM266-X4-K Heavy Chain Amino Acid Sequence |
| 150 | chimeric HM266-X4-K Heavy Chain DNA Sequence |
| 151 | chimeric HM266-X4-K Light Chain Amino Acid Sequence |
| 152 | chimeric HM266-X4-K Light Chain DNA Sequence |
| 153 | chimeric HM266-IgG4-S228P Heavy Chain Amino Acid Sequence |
| 154 | chimeric HM266-IgG4-S228P Heavy Chain DNA Sequence |
| 155 | chimeric HM266-IgG4-S228P Light Chain Amino Acid Sequence |
| 156 | chimeric HM266-IgG4-S228P Light Chain DNA Sequence |
| 157 | chimeric HM266-X2-P Heavy Chain Amino Acid Sequence |
| 158 | chimeric HM266-X2-P Heavy Chain DNA Sequence |
| 159 | chimeric HM266-X2-P Light Chain Amino Acid Sequence |
| 160 | chimeric HM266-X2-P Light Chain DNA Sequence |
| 161 | chimeric HM266-X3-P Heavy Chain Amino Acid Sequence |
| 162 | chimeric HM266-X3-P Heavy Chain DNA Sequence |
| 163 | chimeric HM266-X3-P Light Chain Amino Acid Sequence |
| 164 | chimeric HM266-X3-P Light Chain DNA Sequence |
| 165 | chimeric HM266-X4-P Heavy Chain Amino Acid Sequence |
| 166 | chimeric HM266-X4-P Heavy Chain DNA Sequence |
| 167 | chimeric HM266-X4-P Light Chain Amino Acid Sequence |
| 168 | chimeric HM266-X4-P Light Chain DNA Sequence |
| 169 | humanized HM242-C3-IgG1-K322A Heavy Chain Amino Acid Sequence |
| 170 | humanized HM242-C3-IgG1-K322A Heavy Chain DNA Sequence |
| 171 | humanized HM242-C3-IgG1-K322A Light Chain Amino Acid Sequence |
| 172 | humanized HM242-C3-IgG1-K322A Light Chain DNA Sequence |
| 173 | humanized HM242-D3-IgG1-K322A Heavy Chain Amino Acid Sequence |
| 174 | humanized HM242-D3-IgG1-K322A Heavy Chain DNA Sequence |
| 175 | humanized HM242-D3-IgG1-K322A Light Chain Amino Acid Sequence |
| 176 | humanized HM242-D3-IgG1-K322A Light Chain DNA Sequence |
| 177 | humanized HM268-K8-IgG1-K322A Heavy Chain Amino Acid Sequence |
| 178 | humanized HM268-K8-IgG1-K322A Heavy Chain DNA Sequence |
| 179 | humanized HM268-K8-IgG1-K322A Light Chain Amino Acid Sequence |
| 180 | humanized HM268-K8-IgG1-K322A Light Chain DNA Sequence |
| 181 | humanized HM297-H5-IgG1-K322A Heavy Chain Amino Acid Sequence |
| 182 | humanized HM297-H5-IgG1-K322A Heavy Chain DNA Sequence |
| 183 | humanized HM297-H5-IgG1-K322A Light Chain Amino Acid Sequence |
| 184 | humanized HM297-H5-IgG1-K322A Light Chain DNA Sequence |
| 185 | humanized HM242-C3-X2-K Heavy Chain Amino Acid Sequence |
| 186 | humanized HM242-C3-X2-K Heavy Chain DNA Sequence |
| 187 | humanized HM242-C3-X2-K Light Chain Amino Acid Sequence |
| 188 | humanized HM242-C3-X2-K Light Chain DNA Sequence |
| 189 | humanized HM242-C3-X3-K Heavy Chain Amino Acid Sequence |
| 190 | humanized HM242-C3-X3-K Heavy Chain DNA Sequence |
| 191 | humanized HM242-C3-X3-K Light Chain Amino Acid Sequence |
| 192 | humanized HM242-C3-X3-K Light Chain DNA Sequence |
| 193 | humanized HM242-C3-X3-KE Heavy Chain Amino Acid Sequence |
| 194 | humanized HM242-C3-X3-KE Heavy Chain DNA Sequence |
| 195 | humanized HM242-C3-X3-KE Light Chain Amino Acid Sequence |
| 196 | humanized HM242-C3-X3-KE Light Chain DNA Sequence |
| 197 | humanized HM242-C3-X3-KI Heavy Chain Amino Acid Sequence |
| 198 | humanized HM242-C3-X3-KI Heavy Chain DNA Sequence |
| 199 | humanized HM242-C3-X3-KI Light Chain Amino Acid Sequence |
| 200 | humanized HM242-C3-X3-KI Light Chain DNA Sequence |
| 201 | humanized HM242-C3-X3-KL Heavy Chain Amino Acid Sequence |
| 202 | humanized HM242-C3-X3-KL Heavy Chain DNA Sequence |
| 203 | humanized HM242-C3-X3-KL Light Chain Amino Acid Sequence |
| 204 | humanized HM242-C3-X3-KL Light Chain DNA Sequence |
| 205 | humanized HM242-C3-X3-KS Heavy Chain Amino Acid Sequence |
| 206 | humanized HM242-C3-X3-KS Heavy Chain DNA Sequence |
| 207 | humanized HM242-C3-X3-KS Light Chain Amino Acid Sequence |
| 208 | humanized HM242-C3-X3-KS Light Chain DNA Sequence |
| 209 | humanized HM242-C3-X3-KSI Heavy Chain Amino Acid Sequence |
| 210 | humanized HM242-C3-X3-KSI Heavy Chain DNA Sequence |
| 211 | humanized HM242-C3-X3-KSI Light Chain Amino Acid Sequence |
| 212 | humanized HM242-C3-X3-KSI Light Chain DNA Sequence |
| 213 | humanized HM242-C3-X3-KSL Heavy Chain Amino Acid Sequence |
| 214 | humanized HM242-C3-X3-KSL Heavy Chain DNA Sequence |
| 215 | humanized HM242-C3-X3-KSL Light Chain Amino Acid Sequence |
| 216 | humanized HM242-C3-X3-KSL Light Chain DNA Sequence |
| 217 | humanized HM242-C3-X4-K Heavy Chain Amino Acid Sequence |
| 218 | humanized HM242-C3-X4-K Heavy Chain DNA Sequence |
| 219 | humanized HM242-C3-X4-K Light Chain Amino Acid Sequence |
| 220 | humanized HM242-C3-X4-K Light Chain DNA Sequence |
| 221 | humanized HM242-C3-X4-KS Heavy Chain Amino Acid Sequence |
| 222 | humanized HM242-C3-X4-KS Heavy Chain DNA Sequence |
| 223 | humanized HM242-C3-X4-KS Light Chain Amino Acid Sequence |
| 224 | humanized HM242-C3-X4-KS Light Chain DNA Sequence |
| 225 | humanized HM242-D3-X2-K Heavy Chain Amino Acid Sequence |
| 226 | humanized HM242-D3-X2-K Heavy Chain DNA Sequence |
| 227 | humanized HM242-D3-X2-K Light Chain Amino Acid Sequence |
| 228 | humanized HM242-D3-X2-K Light Chain DNA Sequence |
| 229 | humanized HM242-D3-X3-K Heavy Chain Amino Acid Sequence |
| 230 | humanized HM242-D3-X3-K Heavy Chain DNA Sequence |
| 231 | humanized HM242-D3-X3-K Light Chain Amino Acid Sequence |
| 232 | humanized HM242-D3-X3-K Light Chain DNA Sequence |
| 233 | humanized HM242-D3-X3-KE Heavy Chain Amino Acid Sequence |
| 234 | humanized HM242-D3-X3-KE Heavy Chain DNA Sequence |
| 235 | humanized HM242-D3-X3-KE Light Chain Amino Acid Sequence |
| 236 | humanized HM242-D3-X3-KE Light Chain DNA Sequence |
| 237 | humanized HM242-D3-X3-KI Heavy Chain Amino Acid Sequence |
| 238 | humanized HM242-D3-X3-KI Heavy Chain DNA Sequence |
| 239 | humanized HM242-D3-X3-KI Light Chain Amino Acid Sequence |
| 240 | humanized HM242-D3-X3-KI Light Chain DNA Sequence |
| 241 | humanized HM242-D3-X3-KL Heavy Chain Amino Acid Sequence |
| 242 | humanized HM242-D3-X3-KL Heavy Chain DNA Sequence |
| 243 | humanized HM242-D3-X3-KL Light Chain Amino Acid Sequence |
| 244 | humanized HM242-D3-X3-KL Light Chain DNA Sequence |
| 245 | humanized HM242-D3-X3-KS Heavy Chain Amino Acid Sequence |
| 246 | humanized HM242-D3-X3-KS Heavy Chain DNA Sequence |
| 247 | humanized HM242-D3-X3-KS Light Chain Amino Acid Sequence |
| 248 | humanized HM242-D3-X3-KS Light Chain DNA Sequence |
| 249 | humanized HM242-D3-X3-KSI Heavy Chain Amino Acid Sequence |
| 250 | humanized HM242-D3-X3-KSI Heavy Chain DNA Sequence |
| 251 | humanized HM242-D3-X3-KSI Light Chain Amino Acid Sequence |
| 252 | humanized HM242-D3-X3-KSI Light Chain DNA Sequence |
| 253 | humanized HM242-D3-X3-KSL Heavy Chain Amino Acid Sequence |
| 254 | humanized HM242-D3-X3-KSL Heavy Chain DNA Sequence |
| 255 | humanized HM242-D3-X3-KSL Light Chain Amino Acid Sequence |
| 256 | humanized HM242-D3-X3-KSL Light Chain DNA Sequence |
| 257 | humanized HM242-D3-X4-K Heavy Chain Amino Acid Sequence |
| 258 | humanized HM242-D3-X4-K Heavy Chain DNA Sequence |
| 259 | humanized HM242-D3-X4-K Light Chain Amino Acid Sequence |
| 260 | humanized HM242-D3-X4-K Light Chain DNA Sequence |
| 261 | humanized HM242-D3-X4-KS Heavy Chain Amino Acid Sequence |
| 262 | humanized HM242-D3-X4-KS Heavy Chain DNA Sequence |
| 263 | humanized HM242-D3-X4-KS Light Chain Amino Acid Sequence |
| 264 | humanized HM242-D3-X4-KS Light Chain DNA Sequence |
| 265 | humanized HM268-K8-X2-K Heavy Chain Amino Acid Sequence |
| 266 | humanized HM268-K8-X2-K Heavy Chain DNA Sequence |
| 267 | humanized HM268-K8-X2-K Light Chain Amino Acid Sequence |
| 268 | humanized HM268-K8-X2-K Light Chain DNA Sequence |
| 269 | humanized HM268-K8-X3-K Heavy Chain Amino Acid Sequence |
| 270 | humanized HM268-K8-X3-K Heavy Chain DNA Sequence |
| 271 | humanized HM268-K8-X3-K Light Chain Amino Acid Sequence |
| 272 | humanized HM268-K8-X3-K Light Chain DNA Sequence |
| 273 | humanized HM268-K8-X3-KE Heavy Chain Amino Acid Sequence |
| 274 | humanized HM268-K8-X3-KE Heavy Chain DNA Sequence |
| 275 | humanized HM268-K8-X3-KE Light Chain Amino Acid Sequence |
| 276 | humanized HM268-K8-X3-KE Light Chain DNA Sequence |
| 277 | humanized HM268-K8-X3-KI Heavy Chain Amino Acid Sequence |
| 278 | humanized HM268-K8-X3-KI Heavy Chain DNA Sequence |
| 279 | humanized HM268-K8-X3-KI Light Chain Amino Acid Sequence |
| 280 | humanized HM268-K8-X3-KI Light Chain DNA Sequence |
| 281 | humanized HM268-K8-X3-KL Heavy Chain Amino Acid Sequence |
| 282 | humanized HM268-K8-X3-KL Heavy Chain DNA Sequence |
| 283 | humanized HM268-K8-X3-KL Light Chain Amino Acid Sequence |
| 284 | humanized HM268-K8-X3-KL Light Chain DNA Sequence |
| 285 | humanized HM268-K8-X3-KS Heavy Chain Amino Acid Sequence |
| 286 | humanized HM268-K8-X3-KS Heavy Chain DNA Sequence |
| 287 | humanized HM268-K8-X3-KS Light Chain Amino Acid Sequence |
| 288 | humanized HM268-K8-X3-KS Light Chain DNA Sequence |
| 289 | humanized HM268-K8-X3-KSI Heavy Chain Amino Acid Sequence |
| 290 | humanized HM268-K8-X3-KSI Heavy Chain DNA Sequence |
| 291 | humanized HM268-K8-X3-KSI Light Chain Amino Acid Sequence |
| 292 | humanized HM268-K8-X3-KSI Light Chain DNA Sequence |
| 293 | humanized HM268-K8-X3-KSL Heavy Chain Amino Acid Sequence |
| 294 | humanized HM268-K8-X3-KSL Heavy Chain DNA Sequence |
| 295 | humanized HM268-K8-X3-KSL Light Chain Amino Acid Sequence |
| 296 | humanized HM268-K8-X3-KSL Light Chain DNA Sequence |
| 297 | humanized HM268-K8-X4-K Heavy Chain Amino Acid Sequence |
| 298 | humanized HM268-K8-X4-K Heavy Chain DNA Sequence |
| 299 | humanized HM268-K8-X4-K Light Chain Amino Acid Sequence |
| 300 | humanized HM268-K8-X4-K Light Chain DNA Sequence |
| 301 | humanized HM268-K8-X4-KS Heavy Chain Amino Acid Sequence |
| 302 | humanized HM268-K8-X4-KS Heavy Chain DNA Sequence |
| 303 | humanized HM268-K8-X4-KS Light Chain Amino Acid Sequence |
| 304 | humanized HM268-K8-X4-KS Light Chain DNA Sequence |
| 305 | humanized HM297-H5-X2-K Heavy Chain Amino Acid Sequence |
| 306 | humanized HM297-H5-X2-K Heavy Chain DNA Sequence |
| 307 | humanized HM297-HS-X2-K Light Chain Amino Acid Sequence |
| 308 | humanized HM297-H5-X2-K Light Chain DNA Sequence |
| 309 | humanized HM297-H5-X3-KS Heavy Chain Amino Acid Sequence |
| 310 | humanized HM297-H5-X3-KS Heavy Chain DNA Sequence |
| 311 | humanized HM297-H5-X3-KS Light Chain Amino Acid Sequence |
| 312 | humanized HM297-H5-X3-KS Light Chain DNA Sequence |
| 313 | humanized HM297-H5-X4-K Heavy Chain Amino Acid Sequence |
| 314 | humanized HM297-H5-X4-K Heavy Chain DNA Sequence |
| 315 | humanized HM297-H5-X4-K Light Chain Amino Acid Sequence |
| 316 | humanized HM297-H5-X4-K Light Chain DNA Sequence |
| 317 | humanized HM297-H5-X3-K Heavy Chain Amino Acid Sequence |
| 318 | humanized HM297-H5-X3-K Heavy Chain DNA Sequence |
| 319 | humanized HM297-H5-X3-K Light Chain Amino Acid Sequence |
| 320 | humanized HM297-H5-X3-K Light Chain DNA Sequence |
| 321 | humanized HM297-H5-X3-KSL Heavy Chain Amino Acid Sequence |
| 322 | humanized HM297-H5-X3-KSL Heavy Chain DNA Sequence |
| 323 | humanized HM297-H5-X3-KSL Light Chain Amino Acid Sequence |
| 324 | humanized HM297-H5-X3-KSL Light Chain DNA Sequence |
| 325 | humanized HM297-H5-X3-KSI Heavy Chain Amino Acid Sequence |
| 326 | humanized HM297-H5-X3-KSI Heavy Chain DNA Sequence |
| 327 | humanized HM297-H5-X3-KSI Light Chain Amino Acid Sequence |
| 328 | humanized HM297-H5-X3-KSI Light Chain DNA Sequence |
| 329 | humanized HM297-H5-X3-KL Heavy Chain Amino Acid Sequence |
| 330 | humanized HM297-H5-X3-KL Heavy Chain DNA Sequence |
| 331 | humanized HM297-H5-X3-KL Light Chain Amino Acid Sequence |
| 332 | humanized HM297-H5-X3-KL Light Chain DNA Sequence |
| 333 | humanized HM297-H5-X3-KI Heavy Chain Amino Acid Sequence |
| 334 | humanized HM297-H5-X3-KI Heavy Chain DNA Sequence |
| 335 | humanized HM297-H5-X3-KI Light Chain Amino Acid Sequence |
| 336 | humanized HM297-H5-X3-KI Light Chain DNA Sequence |
| 337 | humanized HM297-H5-X4-KS Heavy Chain Amino Acid Sequence |
| 338 | humanized HM297-H5-X4-KS Heavy Chain DNA Sequence |
| 339 | humanized HM297-H5-X4-KS Light Chain Amino Acid Sequence |
| 340 | humanized HM297-H5-X4-KS Light Chain DNA Sequence |
| 341 | humanized HM297-H5-X3-KE Heavy Chain Amino Acid Sequence |
| 342 | humanized HM297-H5-X3-KE Heavy Chain DNA Sequence |
| 343 | humanized HM297-H5-X3-KE Light Chain Amino Acid Sequence |
| 344 | humanized HM297-H5-X3-KE Light Chain DNA Sequence |
| 345 | HM242-CDR-H1 Amino Acid Sequence (Kabat) |
| 346 | HM242-CDR-H2 Amino Acid Sequence (Kabat) |
| 347 | HM242-CDR-H3 Amino Acid Sequence (Kabat) |
| 348 | HM242-CDR-L1 Amino Acid Sequence (Kabat) |
| 349 | HM242-CDR-L2 Amino Acid Sequence (Kabat) |
| 350 | HM242-CDR-L3 Amino Acid Sequence (Kabat) |
| 351 | HM266-CDR-H1 Amino Acid Sequence (Kabat) |
| 352 | HM266-CDR-H2 Amino Acid Sequence (Kabat) |
| 353 | HM266-CDR-H3 Amino Acid Sequence (Kabat) |
| 354 | HM266-CDR-L1 Amino Acid Sequence (Kabat) |
| 355 | HM266-CDR-L2 Amino Acid Sequence (Kabat) |
| 356 | HM266-CDR-L3 Amino Acid Sequence (Kabat) |
| 357 | HM268-CDR-H1 Amino Acid Sequence (Kabat) |
| 358 | HM268-CDR-H2 Amino Acid Sequence (Kabat) |
| 359 | HM268-CDR-H3 Amino Acid Sequence (Kabat) |
| 360 | HM268-CDR-L1 Amino Acid Sequence (Kabat) |
| 361 | HM268-CDR-L2 Amino Acid Sequence (Kabat) |
| 362 | HM268-CDR-L3 Amino Acid Sequence (Kabat) |
| 363 | HM297-CDR-H1 Amino Acid Sequence (Kabat) |
| 364 | HM297-CDR-H2 Amino Acid Sequence (Kabat) |
| 365 | HM297-CDR-H3 Amino Acid Sequence (Kabat) |
| 366 | HM297-CDR-L1 Amino Acid Sequence (Kabat) |
| 367 | HM297-CDR-L2 Amino Acid Sequence (Kabat) |
| 368 | HM297-CDR-L3 Amino Acid Sequence (Kabat) |
| 369 | HM242-CDR-H1 Amino Acid Sequence (Chothia) |
| 370 | HM242-CDR-H2 Amino Acid Sequence (Chothia) |
| 371 | HM242-CDR-H3 Amino Acid Sequence (Chothia) |
| 372 | HM242-CDR-L1 Amino Acid Sequence (Chothia) |
| 373 | HM242-CDR-L2 Amino Acid Sequence (Chothia) |
| 374 | HM242-CDR-L3 Amino Acid Sequence (Chothia) |
| 375 | HM266-CDR-H1 Amino Acid Sequence (Chothia) |
| 376 | HM266-CDR-H2 Amino Acid Sequence (Chothia) |
| 377 | HM266-CDR-H3 Amino Acid Sequence (Chothia) |
| 378 | HM266-CDR-L1 Amino Acid Sequence (Chothia) |
| 379 | HM266-CDR-L2 Amino Acid Sequence (Chothia) |
| 380 | HM266-CDR-L3 Amino Acid Sequence (Chothia) |
| 381 | HM268-CDR-H1 Amino Acid Sequence (Chothia) |
| 382 | HM268-CDR-H2 Amino Acid Sequence (Chothia) |
| 383 | HM268-CDR-H3 Amino Acid Sequence (Chothia) |
| 384 | HM268-CDR-L1 Amino Acid Sequence (Chothia) |
| 385 | HM268-CDR-L2 Amino Acid Sequence (Chothia) |
| 386 | HM268-CDR-L3 Amino Acid Sequence (Chothia) |
| 387 | HM297-CDR-H1 Amino Acid Sequence (Chothia) |
| 388 | HM297-CDR-H2 Amino Acid Sequence (Chothia) |
| 389 | HM297-CDR-H3 Amino Acid Sequence (Chothia) |
| 390 | HM297-CDR-L1 Amino Acid Sequence (Chothia) |
| 391 | HM297-CDR-L2 Amino Acid Sequence (Chothia) |
| 392 | HM297-CDR-L3 Amino Acid Sequence (Chothia) |
| 393 | HM242-CDR-H1 Amino Acid Sequence (IMGT) |
| 394 | HM242-CDR-H2 Amino Acid Sequence (IMGT) |
| 395 | HM242-CDR-H3 Amino Acid Sequence (IMGT) |
| 396 | HM242-CDR-L1 Amino Acid Sequence (IMGT) |
| 397 | HM242-CDR-L2 Amino Acid Sequence (IMGT) |
| 398 | HM242-CDR-L3 Amino Acid Sequence (IMGT) |
| 399 | HM266-CDR-H1 Amino Acid Sequence (IMGT) |
| 400 | HM266-CDR-H2 Amino Acid Sequence (IMGT) |
| 401 | HM266-CDR-H3 Amino Acid Sequence (IMGT) |
| 402 | HM266-CDR-L1 Amino Acid Sequence (IMGT) |
| 403 | HM266-CDR-L2 Amino Acid Sequence (IMGT) |
| 404 | HM266-CDR-L3 Amino Acid Sequence (IMGT) |
| 405 | HM268-CDR-H1 Amino Acid Sequence (IMGT) |
| 406 | HM268-CDR-H2 Amino Acid Sequence (IMGT) |
| 407 | HM268-CDR-H3 Amino Acid Sequence (IMGT) |
| 408 | HM268-CDR-L1 Amino Acid Sequence (IMGT) |
| 409 | HM268-CDR-L2 Amino Acid Sequence (IMGT) |
| 410 | HM268-CDR-L3 Amino Acid Sequence (IMGT) |
| 411 | HM297-CDR-H1 Amino Acid Sequence (IMGT) |
| 412 | HM297-CDR-H2 Amino Acid Sequence (IMGT) |
| 413 | HM297-CDR-H3 Amino Acid Sequence (IMGT) |
| 414 | HM297-CDR-L1 Amino Acid Sequence (IMGT) |
| 415 | HM297-CDR-L2 Amino Acid Sequence (IMGT) |
| 416 | HM297-CDR-L3 Amino Acid Sequence (IMGT) |
| 417 | HM242-CDR-H1 Amino Acid Sequence (Paratome) |
| 418 | HM242-CDR-H2 Amino Acid Sequence (Paratome) |
| 419 | HM242-CDR-H3 Amino Acid Sequence (Paratome) |
| 420 | HM242-CDR-L1 Amino Acid Sequence (Paratome) |
| 421 | HM242-CDR-L2 Amino Acid Sequence (Paratome) |
| 422 | HM242-CDR-L3 Amino Acid Sequence (Paratome) |
| 423 | HM266-CDR-H1 Amino Acid Sequence (Paratome) |
| 424 | HM266-CDR-H2 Amino Acid Sequence (Paratome) |
| 425 | HM266-CDR-H3 Amino Acid Sequence (Paratome) |
| 426 | HM266-CDR-L1 Amino Acid Sequence (Paratome) |
| 427 | HM266-CDR-L2 Amino Acid Sequence (Paratome) |
| 428 | HM266-CDR-L3 Amino Acid Sequence (Paratome) |
| 429 | HM268-CDR-H1 Amino Acid Sequence (Paratome) |
| 430 | HM268-CDR-H2 Amino Acid Sequence (Paratome) |
| 431 | HM268-CDR-H3 Amino Acid Sequence (Paratome) |
| 432 | HM268-CDR-L1 Amino Acid Sequence (Paratome) |
| 433 | HM268-CDR-L2 Amino Acid Sequence (Paratome) |
| 434 | HM268-CDR-L3 Amino Acid Sequence (Paratome) |
| 435 | HM297-CDR-H1 Amino Acid Sequence (Paratome) |
| 436 | HM297-CDR-H2 Amino Acid Sequence (Paratome) |
| 437 | HM297-CDR-H3 Amino Acid Sequence (Paratome) |
| 438 | HM297-CDR-L1 Amino Acid Sequence (Paratome) |
| 439 | HM297-CDR-L2 Amino Acid Sequence (Paratome) |
| 440 | HM297-CDR-L3 Amino Acid Sequence (Paratome) |

1. An agonist antibody to human PD-1 or a functional fragment thereof, wherein the antibody or a functional fragment thereof binds to domain #7 as shown in SEQ ID NO: 9, of human PD-1.

2. The antibody or a functional fragment thereof of claim 1, wherein the antibody or a functional fragment thereof has any one of (A) to (D) below:
(A) an antibody heavy chain variable region sequence comprising CDR1, CDR2 and CDR3 in the amino acid sequence as shown in SEQ ID NO: 17 and an antibody light chain variable region sequence comprising CDR1, CDR2 and CDR3 in the amino acid sequence as shown in SEQ ID NO: 34;
(B) an antibody heavy chain variable region sequence comprising CDR1, CDR2 and CDR3 in the amino acid sequence as shown in SEQ ID NO: 22 and an antibody light chain variable region sequence comprising CDR1, CDR2 and CDR3 in the amino acid sequence as shown in SEQ ID NO: 38;
(C) an antibody heavy chain variable region sequence comprising CDR1, CDR2 and CDR3 in the amino acid sequence as shown in SEQ ID NO: 28 and an antibody light chain variable region sequence comprising CDR1, CDR2 and CDR3 in the amino acid sequence as shown in SEQ ID NO: 42; or
(D) an antibody heavy chain variable region sequence comprising CDR1, CDR2 and CDR3 in the amino acid sequence as shown in SEQ ID NO: 33 and an antibody light chain variable region sequence comprising CDR1, CDR2 and CDR3 in the amino acid sequence as shown in SEQ ID NO: 46.

3. The antibody or a functional fragment thereof of claim 1, wherein the antibody or a functional fragment thereof has either the following (A) to (D) below:
(A) an antibody heavy chain variable region comprising complementarity determining region (CDR) 1 of SEQ ID NO: 345, CDR2 of SEQ ID NO: 346 and CDR3 of SEQ ID NO: 347, as well as an antibody light chain variable region comprising CDR1 of SEQ ID NO: 348, CDR2 of SEQ ID NO: 349 and CDR3 of SEQ ID NO: 350;
(B) an antibody heavy chain variable region comprising CDR1 of SEQ ID NO: 351, CDR2 of SEQ ID NO: 352 and CDR3 of SEQ ID NO: 353, as well as an antibody light chain variable region comprising CDR1 of SEQ ID NO: 354, CDR2 of SEQ ID NO: 355 and CDR3 of SEQ ID NO: 356;
(C) an antibody heavy chain variable region comprising CDR1 of SEQ ID NO: 357, CDR2 of SEQ ID NO: 358 and CDR3 of SEQ ID NO: 359, as well as an antibody light chain variable region comprising CDR1 of SEQ ID NO: 360, CDR2 of SEQ ID NO: 361 and CDR3 of SEQ ID NO: 362; or
(D) an antibody heavy chain variable region comprising CDR1 of SEQ ID NO: 363, CDR2 of SEQ ID NO: 364 and CDR3 of SEQ ID NO: 365, as well as an antibody light chain variable region comprising CDR1 of SEQ ID NO: 366, CDR2 of SEQ ID NO: 367 and CDR3 of SEQ ID NO: 368.

4. The antibody or a functional fragment thereof of claim 1, wherein the antibody variable region comprises the framework of human antibody or the framework of humanized antibody.

5. The antibody or a functional fragment thereof of claim 1, wherein the antibody or a functional fragment thereof has either the following (A) to (D) below:
(A) an antibody heavy chain variable region having the amino acid sequence as shown in SEQ ID NO: 20 and a light chain variable region having the amino acid sequence as shown in SEQ ID NO: 37;
(B) an antibody heavy chain variable region having the amino acid sequence as shown in SEQ ID NO: 21 and a light chain variable region having the amino acid sequence as shown in SEQ ID NO: 37;
(C) an antibody heavy chain variable region having the amino acid sequence as shown in SEQ ID NO: 26 and a light chain variable region having the amino acid sequence as shown in SEQ ID NO: 40; or
(D) an antibody heavy chain variable region having the amino acid sequence as shown in SEQ ID NO: 30 and a light chain variable region having the amino acid sequence as shown in SEQ ID NO: 44.

6. The antibody or a functional fragment thereof of claim 1, wherein the antibody heavy chain constant region and the antibody light chain constant region comprise an amino acid sequence derived from human antibody.

7. The antibody or a functional fragment thereof of claim 1, wherein the antibody heavy chain constant region is the antibody heavy chain constant region of human IgG.

8. The antibody or a functional fragment thereof of claim 7, wherein the antibody heavy chain constant region of said human IgG is the antibody heavy chain constant region of human IgG1.

9. The antibody or a functional fragment thereof of claim 1, wherein the antibody light chain constant region is the antibody light chain constant region of human Igk.

10. The antibody or a functional fragment thereof of claim 1, wherein the antibody or a functional fragment thereof has an improved affinity to any one or more of the following receptors: human FcγRIIA, human FcγRIIB or human FcγRIIA.

11. The antibody or a functional fragment thereof of claim 1, wherein the antibody or a functional fragment thereof has an improved affinity to human FcγRIIB.

12. The antibody or a functional fragment thereof of claim 1, wherein the antibody or a functional fragment thereof has an improved affinity to human FcγRIIIA.

13. The antibody or a functional fragment thereof of claim 11, wherein the improvement of affinity to human FcγRIIB is, compared to a reference antibody having the Fc region of human IgG1-K322A, by 1.5 folds or more, preferably by 2.0 folds or more, and still more preferably by 2.5 folds or more, in a test measuring Fc receptor binding affinity using the surface plasmon resonance technique.

14. The antibody or a functional fragment thereof of claim 11, wherein the improvement of affinity to human FcγRIIB is, compared to a reference antibody having the Fc region of human IgG1-K322A, by 2 folds or more, preferably by 5 folds or more, and still more preferably by 20 folds or more, in a test of measuring the affinity to a human Fc receptor-expressing cell line with a flow cytometer.

15. The antibody or a functional fragment thereof of claim 12, wherein the improvement of affinity to human FcγRIIIA is, compared to a reference antibody having the Fc region of human IgG1-K322A, by 1.5 folds or more, preferably by 2.0 folds or more, and still more preferably by 2.5 folds or more, in a test measuring Fc receptor binding affinity using the surface plasmon resonance technique.

16. The antibody or a functional fragment thereof of claim 12, wherein the improvement of affinity to human FcγRIIIA is, compared to a reference antibody having the Fc region of human IgG1-K322A, by 1.5 folds or more, preferably by 2.0 folds or more, still more preferably by 4.0 folds or more, and most preferably by 5.0 folds or more, in a test of measuring the affinity to a human Fc receptor-expressing cell line with a flow cytometer.

17. The antibody or a functional fragment thereof of claim 10, wherein the antibody or a functional fragment has a modified Fc region of human IgG, and the affinity of the antibody or a functional fragment thereof to said receptor has been improved by modification of the Fc region of human IgG.

18. The antibody or a functional fragment thereof of claim 10, wherein the antibody or a functional fragment has a modified Fc region of human IgG1 or human IgG4, and the affinity of the antibody or a functional fragment thereof to said receptor has been improved by modification of the Fc region of human IgG1 or human IgG4.

19. The antibody or a functional fragment thereof of claim 10, wherein any of the amino acids at positions 233, 234, 236, 237, 238, 239, 267, 268, 271, 296, 323, 326, 328, 330 and 332 (according to EU numbering) in the amino acid sequence of the Fc region of human IgG1 is modified.

20. The antibody or a functional fragment thereof of claim 19, wherein the modification of amino acids is any one of the combinations G236D/H268D, S239D/H268D, S239D/H268D/L328Y/I332E, G236D/H268D/K322A, S239D/H268D/K322A, S239D/S267G/H268D/K322A, G236D/H268D/E293A/K322A, S239D/H268D/K322A/L328Y/I332E, S239D/H268D/E293A/K322A, S239D/S267G/H268D/K322A/L328Y, S239D/S267G/H268D/K322A/I332E, S239D/H268D/K322A/L328Y, S239D/H268D/K322A/I332E, S239D/S267G/H268D/K322A/L328Y/I332E, E233D/G237D/P238D/H268D/P271G/A330R and S267E/L328F.

21. The antibody or a functional fragment thereof of claim 10, wherein any of the amino acids at positions 236, 239, 268, 328 and 332 (according to EU numbering) in the amino acid sequence of the Fc region of human IgG4 is modified.

22. The antibody or a functional fragment thereof of claim 21, wherein the modification of amino acids is any one of the combinations S228P/G236D/Q268D, S228P/S239D/Q268D, and S228P/S239D/Q268D/L328Y/I332E.

23. The antibody or a functional fragment thereof of claim 10, wherein the antibody comprises either the following (A) to (D) below:
(A) an antibody heavy chain sequence having the amino acid sequence as shown in SEQ ID NO: 245 and an antibody light chain sequence having the amino acid sequence as shown in SEQ ID NO:247;
(B) an antibody heavy chain sequence having the amino acid sequence as shown in SEQ ID NO: 277 and an antibody light chain sequence having the amino acid sequence as shown in SEQ ID NO: 279;
(C) an antibody heavy chain sequence having the amino acid sequence as shown in SEQ ID NO: 285 and an antibody light chain sequence having the amino acid sequence as shown in SEQ ID NO: 287; or
(D) an antibody heavy chain sequence having the amino acid sequence as shown in SEQ ID NO: 289 and an antibody light chain sequence having the amino acid sequence as shown in SEQ ID NO: 291.

24. The antibody or a functional fragment thereof of claim 12, wherein the antibody or a functional fragment thereof is defucosylated.

25. An isolated nucleic acid molecule encoding the antibody or a functional fragment thereof of claim 1.

26. A vector comprising the nucleic acid molecule of claim 25.

27. A host cell comprising the nucleic acid molecule of claim 25.

28. A host cell comprising the vector of claim 26.

29. A method of producing an antibody or a functional fragment thereof, comprising a step of culturing the host cell of claim 27.

30. A pharmaceutical composition comprising the antibody or a functional fragment thereof of claim 1 and a pharmaceutically acceptable carrier.

The application's sequence listing, which the Patent Office published only in electronic form, follows.

SEQUENCE LISTING (440 sequences)

SEQ ID NO: 1 - protein, 288 aa, Homo sapiens
MQIPQAPWPVVWAVLQLGWRPGWFLDSPDRPWNPPTFSPALLVVTEGDNATFTCSFSNTSESFVLNWYRMSPSNQTDKLAAFPEDRSQPGQDCRFRVTQLPNGRDFHMSVVRARRNDSGTYLCGAISLAPKAQIKESLRAELRVTERRAEVPTAHPSPSPRPAGQFQTLVVGVVGGLLGSLVLLVWVLAVICSRAARGTIGARRTGQPLKEDPSAVPVFSVDYGELDFQWREKTPEPPVPCVPEQTEYATIVFPSGMGTSSPARRGSADGPRSAQPLRPEDGHCSWPL

SEQ ID NO: 2 - protein, 288 aa, Mus musculus
MWVRQVPWSFTWAVLQLSWQSGWLLEVPNGPWRSLTFYPAWLTVSEGANATFTCSLSNWSEDLMLNWNRLSPSNQTEKQAAFCNGLSQPVQDARFQIIQLPNRHDFHMNILDTRRNDSGIYLCGAISLHPKAKIEESPGAELVVTERILETSTRYPSPSPKPEGRFQGMVIGIMSALVGIPVLLLLAWALAVFCSTSMSEARGAGSKDDTLKEEPSAAPVPSVAYEELDFQGREKTPELPTACVHTEYATIVFTEGLGASAMGRRGSADGLQGPRPPRHEDGHCSWPL

SEQ ID NO: 3 - protein, 11 aa, Homo sapiens
APKAQIKESLR

SEQ ID NO: 4 - protein, 9 aa, Homo sapiens
FSNTSESFV

SEQ ID NO: 5 - protein, 11 aa, Homo sapiens
DSPDRPWNPPT

SEQ ID NO: 6 - protein, 9 aa, Homo sapiens
RVTQLPNGR

SEQ ID NO: 7 - protein, 11 aa, Homo sapiens
PEDRSQPGQDC

SEQ ID NO: 8 - protein, 12 aa, Homo sapiens
SVVRARRNDSGT

SEQ ID NO: 9 - protein, 11 aa, Homo sapiens
SPALLVVTEGD

SEQ ID NO: 10 - protein, 11 aa, Homo sapiens
RAEVPTAHPSP

SEQ ID NO: 11 - protein, 374 aa, Homo sapiens
MWFLTTLLLWVPVDGQVDTTKAVITLQPPWVSVFQEETVTLHCEVLHLPGSSSTQWFLNGTATQTSTPSYRITSASVNDSGEYRCQRGLSGRSDPIQLEIHRGWLLLQVSSRVFTEGEPLALRCHAWKDKLVYNVLYYRNGKAFKFFHWNSNLTILKTNISHNGTYHCSGMGKHRYTSAGISVTVKELFPAPVLNASVTSPLLEGNLVTLSCETKLLLQRPGLQLYFSFYMGSKTLRGRNTSSEYQILTARREDSGLYWCEAATEDGNVLKRSPELELQVLGLQLPTPVWFHVLFYLAVGIMFLVNTVLWVTIRKELKRKKKWDLEISLDSGHEKKVISSLQEDRHLEEELKCQEQKEEQLQEGVHRKEPQGAT

SEQ ID NO: 12 - protein, 317 aa, Homo sapiens
MTMETQMSQNVCPRNLWLLQPLTVLLLLASADSQAAAPPKAVLKLEPPWINVLQEDSVTLTCQGARSPESDSIQWFHNGNLIPTHTQPSYRFKANNNDSGEYTCQTGQTSLSDPVHLTVLSEWLVLQTPHLEFQEGETIMLRCHSWKDKPLVKVTFFQNGKSQKFSHLDPTFSIPQANHSHSGDYHCTGNIGYTLFSSKPVTITVQVPSMGSSSPMGIIVAVVIATAVAAIVAAVVALIYCRKKRISANSTDPVKAAQFEPPGRQMIAIRKRQLEETNNDYETADGGYMTLNPRAPTDDDKNIYLTLPPNDHVNSNN

SEQ ID NO: 13 - protein, 317 aa, Homo sapiens [sequence omitted]

SEQ ID NO: 14 - protein, 310 aa, Homo sapiens
MGILSFLPVLATESDWADCKSPQPWGHMLLWTAVLFLAPVAGTPAAPPKAVLKLEPQWINVLQEDSVTLTCRGTHSPESDSIQWFHNGNLIPTHTQPSYRFKANNNDSGEYTCQTGQTSLSDPVHLTVLSEWLVLQTPHLEFQEGETIVLRCHSWKDKPLVKVTFFQNGKSKKFSRSNPNFSIPQANHSHSGDYHCTGNIGYTLYSSKPVTITVQAPSSSPMGIIVAVVTGIAVAAIVAAVVALIYCRKKRISALPGYPECREMGETLPEKPANPTNPDEADKVGAENTITYSLLMHPDALEEPDDQNRI

SEQ ID NO: 15 - protein, 359 aa, Homo sapiens
MAEGTLWQILCVSSDAQPQTFEGVKGADPPTLPPGSFLPGPVLWWGSLARLQTEKSDEVSRKGNWWVTEMGGGAGERLFTSSCLVGLVPLGLRISLVTCPLQCGIMWQLLLPTALLLLVSAGMRTEDLPKAVVFLEPQWYRVLEKDSVTLKCQGAYSPEDNSTQWFHNESLISSQASSYFIDAATVDDSGEYRCQTNLSTLSDPVQLEVHIGWLLLQAPRWVFKEEDPIHLRCHSWKNTALHKVTYLQNGKGRKYFHHNSDFYIPKATLKDSGSYFCRGLFGSKNVSSETVNITITQGLAVSTISSFFPPGYQVSFCLVMVLLFAVDTGLYFSVKTNIRSSTRDWKDHKFKWRKDPQDK

SEQ ID NO: 16 - protein, 359 aa, Homo sapiens
MAEGTLWQILCVSSDAQPQTFEGVKGADPPTLPPGSFLPGPVLWWGSLARLQTEKSDEVSRKGNWWVTEMGGGAGERLFTSSCLVGLVPLGLRISLVTCPLQCGIMWQLLLPTALLLLVSAGMRTEDLPKAVVFLEPQWYRVLEKDSVTLKCQGAYSPEDNSTQWFHNESLISSQASSYFIDAATVDDSGEYRCQTNLSTLSDPVQLEVHIGWLLLQAPRWVFKEEDPIHLRCHSWKNTALHKVTYLQNGKGRKYFHHNSDFYIPKATLKDSGSYFCRGLVGSKNVSSETVNITITQGLAVSTISSFFPPGYQVSFCLVMVLLFAVDTGLYFSVKTNIRSSTRDWKDHKFKWRKDPQDK

SEQ ID NO: 17 - protein, 117 aa, Mus musculus
QVQLQQSGPELVKPGASVKMSCKASGYTFTSYYIQWVKQRPGQGLEWIGWIYPGDGTTKYNEKFKGKTTLTIDKSSRTAYMLFNSLTSEDSGIYFCASYYGSYFDYWGQGTTLTVSS

SEQ ID NO: 18 - protein, 117 aa, Artificial Sequence
  humanized VH ver.A (HM242)
QVQLVQSGPELVKPGASVKVVCKASGYTFTSYYIQWVKQRPGQGLEWIGWIYPGDGTTKYNEKFKGKTTLTIDKSTRTAYMELRSLRSDDTAVYYCASYYGSYFDYWGQGTLVTVSS

SEQ ID NO: 19 - protein, 117 aa, Artificial Sequence
  humanized VH ver.B (HM242)
QVQLVQSGPEVKKPGASVKVVCKASGYTFTSYYIQWVRQVPGQGLEWMGWIYPGDGTTKYNEKFKGKTTLTIDKSTRTAYMELRSLRSDDTAVYYCASYYGSYFDYWGQGTLVTVSS

SEQ ID NO: 20 - protein, 117 aa, Artificial Sequence
  humanized VH ver.C (HM242)
QVQLVQSGPEVKKPGASVKVVCKASGYTFTSYYIQWVKQRPGQGLEWIGWIYPGDGTTKYNEKFKGRVTMTIDKSTRTAYMELRSLRSDDTAVYYCASYYGSYFDYWGQGTLVTVSS

SEQ ID NO: 21 - protein, 117 aa, Artificial Sequence
  humanized VH ver.D (HM242)
QVQLVQSGPEVKKPGASVKVVCKASGYTFTSYYIQWVRQVPGQGLEWMGWIYPGDGTTKYNEKFKGRVTMTIDTSTSTAYMELRSLRSDDTAVYYCASYYGSYFDYWGQGTLVTVSS

SEQ ID NO: 22 - protein, 116 aa, Mus musculus
EVLLQQSGPELVKPGASVKIPCKASGYTFTDYNVDWVRQSHGKSLEWIGDIDPNNGGTIYNQKFKDKATLTVDKSSRTAYMELRSLTSEDTAVYYCARWRGAMDYWGQGTSVTVSS

SEQ ID NO: 23 - protein, 116 aa, Artificial Sequence
  humanized VH ver.E (HM297)
QVQLVQSGPELVKPGASVKIPCKASGYTFTDYNVDWVRQSHGKSLEWIGDIDPNNGGTIYNQKFKDKATLTVDKSTRTAYMELRSLRSDDTAVYYCARWRGAMDYWGQGTLVTVSS

SEQ ID NO: 24 - protein, 116 aa, Artificial Sequence
  humanized VH ver.F (HM297)
QVQLVQSGPEVKKPGASVKIPCKASGYTFTDYNVDWVRQSHGKSLEWIGDIDPNNGGTIYNQKFKDRVTMTVDKSTRTAYMELRSLRSDDTAVYYCARWRGAMDYWGQGTLVTVSS

SEQ ID NO: 25 - protein, 116 aa, Artificial Sequence
  humanized VH ver.G (HM297)
QVQLVQSGPEVKKPGASVKIPCKASGYTFTDYNVDWVRQVPGQGLEWIGDIDPNNGGTIYNQKFKDKATLTVDKSTRTAYMELRSLRSDDTAVYYCARWRGAMDYWGQGTLVTVSS

SEQ ID NO: 26 - protein, 116 aa, Artificial Sequence
  humanized VH ver.H (HM297)
QVQLVQSGPEVKKPGASVKIPCKASGYTFTDYNVDWVRQVPGQGLEWMGDIDPNNGGTIYNQKFKDRVTMTVDKSTRTAYMELRSLRSDDTAVYYCARWRGAMDYWGQGTLVTVSS

SEQ ID NO: 27 - protein, 116 aa, Artificial Sequence
  humanized VH ver.I (HM297)
QVQLVQSGPEVKKPGASVKVVCKASGYTFTDYNVDWVRQVPGQGLEWMGDIDPNNGGTIYNQKFKDRVTMTVDTSTRTAYMELRSLRSDDTAVYYCARWRGAMDYWGQGTLVTVSS

SEQ ID NO: 28 - protein, 117 aa, Mus musculus
QVQLQQSGPELVKPGASVKMPCKTSGYTFTSYYIQWLKQRPGQGLEWIGWIYFGDASTKYNEKFKGKTTLTADKSSSTAYMLLSSLTSEDSGIYFCASYYGSYFDYWGQGTTLTVSS

SEQ ID NO: 29 - protein, 117 aa, Artificial Sequence
  humanized VH ver.J (HM268)
QVQLVQSGPEVKKPGASVKVVCKTSGYTFTSYYIQWVRQVPGQGLEWMGWIYFGDASTKYNEKFKGKTTLTADKSTSTAYMELRSLRSDDTAVYYCASYYGSYFDYWGQGTTVTVSS

SEQ ID NO: 30 - protein, 117 aa, Artificial Sequence
  humanized VH ver.K (HM268)
QVQLVQSGPEVKKPGASVKVVCKTSGYTFTSYYIQWLKQRPGQGLEWIGWIYFGDASTKYNEKFKGRVTMTADKSTSTAYMELRSLRSDDTAVYYCASYYGSYFDYWGQGTTVTVSS

SEQ ID NO: 31 - protein, 117 aa, Artificial Sequence
  humanized VH ver.L (HM268)
QVQLVQSGPEVKKPGASVKVVCKTSGYTFTSYYIQWVRQVPGQGLEWMGWIYFGDASTKYNEKFKGRVTMTADTSTSTAYMELRSLRSDDTAVYYCASYYGSYFDYWGQGTTVTVSS

SEQ ID NO: 32 - protein, 117 aa, Artificial Sequence
  humanized VH ver.M (HM268)
QVQLVQSGPEVKKPGASVKVVCKASGYTFTSYYIQWVRQVPGQGLEWMGWIYFGDASTKYNEKFKGRVTMTADTSTSTAYMELRSLRSDDTAVYYCASYYGSYFDYWGQGTTVTVSS

SEQ ID NO: 33 - protein, 117 aa, Mus musculus
QVQLQQSGPELVKPGASVKMSCKASGYTFTSYYIQWVKQRPGQGLEWIGWIYPGDGSSKYNEKFKGKTTLTADKSSSTAYMLLSSLTSEDSGIYFCASYYGSSFDYWGQGTTLTVSS

SEQ ID NO: 34 - protein, 107 aa, Mus musculus
DIQMTQTTSSLSASLGDRVTISCRASQDISNYLNWYQQKPDGTVTLLIYYTSKLHSGVPSRFSGSGSGTDYSLTITNLEQKDFATYFCQQSSTLPFTFGGGTKLEIK

SEQ ID NO: 35 - protein, 107 aa, Artificial Sequence
  humanized VL ver.1 (HM242)
DIQMTQTTSSLSASVGDRVTITCRASQDISNYLNWYQQKPDGTVTLLIYYTSKLHSGVPSRFSGSGSGTDYTLTISSLEQKDFATYYCQQSSTLPFTFGQGTKLEIK

SEQ ID NO: 36 - protein, 107 aa, Artificial Sequence
  humanized VL ver.2 (HM242)
DIQMTQSPSSLSASVGDRVTITCRASQDISNYLNWYQQKPDGTVTLLIYYTSKLHSGVPSRFSGSGSGTDYTLTISSLQPEDFATYYCQQSSTLPFTFGQGTKLEIK

SEQ ID NO: 37 - protein, 107 aa, Artificial Sequence
  humanized VL ver.3 (HM242)
DIQMTQSPSSLSASVGDRVTITCRASQDISNYLNWYQQKPGKAPKLLIYYTSKLHSGVPSRFSGSGSGTDYTLTISSLQPEDFATYYCQQSSTLPFTFGQGTKLEIK

SEQ ID NO: 38 - protein, 107 aa, Mus musculus
DVQMTQTTSSLSASLGDRVTISCRASQDIDNYLKWYQQKPDGTVKLLIYDTSRLHSGVPSRFSGSGSGTDYSLTISNLKQEDIATYFCQQGYTLPWTFGGGTRLEIK

SEQ ID NO: 39 - protein, 107 aa, Artificial Sequence
  humanized VL ver.4 (HM297)
DIQMTQTTSSLSASVGDRVTITCRASQDIDNYLKWYQQKPDGTVKLLIYDTSRLHSGVPSRFSGSGSGTDYTLTISSLKQEDFATYYCQQGYTLPWTFGQGTKLEIK

SEQ ID NO: 40 - protein, 107 aa, Artificial Sequence
  humanized VL ver.5 (HM297)
DIQMTQSPSSLSASVGDRVTITCRASQDIDNYLKWYQQKPDGTVKLLIYDTSRLHSGVPSRFSGSGSGTDYTLTISSLKQEDFATYYCQQGYTLPWTFGQGTKLEIK

SEQ ID NO: 41 - protein, 107 aa, Artificial Sequence
  humanized VL ver.6 (HM297)
DIQMTQSPSSLSASVGDRVTITCRASQDIDNYLKWYQQKPGKAPKLLIYDTSRLHSGVPSRFSGSGSGTDYTLTISSLQPEDFATYYCQQGYTLPWTFGQGTKLEIK

SEQ ID NO: 42 - protein, 107 aa, Mus musculus
NIQMTQNTSSLSATLGVRVTISCRASQDISNYLNWYQQKPDGTVKLLIYSTSRLHSGIPSRFSGSGSGTDYSLTISNLEQEDIATYFCQQGSTLPFTFGGGTKLEIK

SEQ ID NO: 43 - protein, 107 aa, Artificial Sequence
  humanized VL ver.7 (HM268)
DIQMTQNTSSLSASVGDRVTITCRASQDISNYLNWYQQKPDGTVKLLIYSTSRLHSGVPSRFSGSGSGTDYTLTISSLEQEDFATYYCQQGSTLPFTFGQGTKLEIK

SEQ ID NO: 44 - protein, 107 aa, Artificial Sequence
  humanized VL ver.8 (HM268)
DIQMTQSPSSLSASVGDRVTITCRASQDISNYLNWYQQKPDGTVKLLIYSTSRLHSGVPSRFSGSGSGTDYTLTISSLQPEDFATYYCQQGSTLPFTFGQGTKLEIK

SEQ ID NO: 45 - protein, 107 aa, Artificial Sequence
  humanized VL ver.9 (HM268)
DIQMTQSPSSLSASVGDRVTITCRASQDISNYLNWYQQKPGKAPKLLIYSTSRLHSGVPSRFSGSGSGTDYTLTISSLQPEDFATYYCQQGSTLPFTFGQGTKLEIK

SEQ ID NO: 46 - protein, 107 aa, Mus musculus
DIQMTQTTSSLSASLGDRVTISCRASQDISNYLNWYQQKPDGTVKFLIYYSSRLHSGVPSRFSGSGSGTDYSLTISNLEQEDIATYFCQQGSTLPFTFGGGTKLEIK

SEQ ID NO: 47 - protein, 232 aa, Homo sapiens
EPKSCDKTHTCPPCPAPELLGGPSVFLFPPKPKDTLMISRTPEVTCVVVDVSHEDPEVKFNWYVDGVEVHNAKTKPREEQYNSTYRVVSVLTVLHQDWLNGKEYKCKVSNKALPAPIEKTISKAKGQPREPQVYTLPPSRDELTKNQVSLTCLVKGFYPSDIAVEWESNGQPENNYKTTPPVLDSDGSFFLYSKLTVDKSRWQQGNVFSCSVMHEALHNHYTQKSLSLSPGK

SEQ ID NO: 48 - protein, 232 aa, Artificial Sequence
  Human IgG1 Fc_K322A amino acid sequence
EPKSCDKTHTCPPCPAPELLGGPSVFLFPPKPKDTLMISRTPEVTCVVVDVSHEDPEVKFNWYVDGVEVHNAKTKPREEQYNSTYRVVSVLTVLHQDWLNGKEYKCAVSNKALPAPIEKTISKAKGQPREPQVYTLPPSRDELTKNQVSLTCLVKGFYPSDIAVEWESNGQPENNYKTTPPVLDSDGSFFLYSKLTVDKSRWQQGNVFSCSVMHEALHNHYTQKSLSLSPGK

SEQ ID NO: 49 - protein, 232 aa, Artificial Sequence
  Human IgG1 Fc_G236D/H268D(X2) amino acid sequence
EPKSCDKTHTCPPCPAPELLDGPSVFLFPPKPKDTLMISRTPEVTCVVVDVSDEDPEVKFNWYVDGVEVHNAKTKPREEQYNSTYRVVSVLTVLHQDWLNGKEYKCKVSNKALPAPIEKTISKAKGQPREPQVYTLPPSRDELTKNQVSLTCLVKGFYPSDIAVEWESNGQPENNYKTTPPVLDSDGSFFLYSKLTVDKSRWQQGNVFSCSVMHEALHNHYTQKSLSLSPGK

SEQ ID NO: 50 - protein, 232 aa, Artificial Sequence
  Human IgG1 Fc_G236D/H268D/K322A(X2-K) amino acid sequence
EPKSCDKTHTCPPCPAPELLDGPSVFLFPPKPKDTLMISRTPEVTCVVVDVSDEDPEVKFNWYVDGVEVHNAKTKPREEQYNSTYRVVSVLTVLHQDWLNGKEYKCAVSNKALPAPIEKTISKAKGQPREPQVYTLPPSRDELTKNQVSLTCLVKGFYPSDIAVEWESNGQPENNYKTTPPVLDSDGSFFLYSKLTVDKSRWQQGNVFSCSVMHEALHNHYTQKSLSLSPGK

SEQ ID NO: 51 - protein, 232 aa, Artificial Sequence
  Human IgG1 Fc_G236D/H268D/E293A/K322A(X2-KE) amino acid sequence
EPKSCDKTHTCPPCPAPELLDGPSVFLFPPKPKDTLMISRTPEVTCVVVDVSDEDPEVKFNWYVDGVEVHNAKTKPRAEQYNSTYRVVSVLTVLHQDWLNGKEYKCAVSNKALPAPIEKTISKAKGQPREPQVYTLPPSRDELTKNQVSLTCLVKGFYPSDIAVEWESNGQPENNYKTTPPVLDSDGSFFLYSKLTVDKSRWQQGNVFSCSVMHEALHNHYTQKSLSLSPGK

SEQ ID NO: 52 - protein, 232 aa, Artificial Sequence
  Human IgG1 Fc_S236D/S267G/H268D/K322A(X2-KS) amino acid sequence
EPKSCDKTHTCPPCPAPELLDGPSVFLFPPKPKDTLMISRTPEVTCVVVDVGDEDPEVKFNWYVDGVEVHNAKTKPREEQYNSTYRVVSVLTVLHQDWLNGKEYKCAVSNKALPAPIEKTISKAKGQPREPQVYTLPPSRDELTKNQVSLTCLVKGFYPSDIAVEWESNGQPENNYKTTPPVLDSDGSFFLYSKLTVDKSRWQQGNVFSCSVMHEALHNHYTQKSLSLSPGK

SEQ ID NO: 53 - protein, 232 aa, Artificial Sequence
  Human IgG1 Fc_S239D/H268D(X3) amino acid sequence
EPKSCDKTHTCPPCPAPELLGGPDVFLFPPKPKDTLMISRTPEVTCVVVDVSDEDPEVKFNWYVDGVEVHNAKTKPREEQYNSTYRVVSVLTVLHQDWLNGKEYKCKVSNKALPAPIEKTISKAKGQPREPQVYTLPPSRDELTKNQVSLTCLVKGFYPSDIAVEWESNGQPENNYKTTPPVLDSDGSFFLYSKLTVDKSRWQQGNVFSCSVMHEALHNHYTQKSLSLSPGK

SEQ ID NO: 54 - protein, 232 aa, Artificial Sequence
  Human IgG1 Fc_S239D/H268D/K322A(X3-K) amino acid sequence
EPKSCDKTHTCPPCPAPELLGGPDVFLFPPKPKDTLMISRTPEVTCVVVDVSDEDPEVKFNWYVDGVEVHNAKTKPREEQYNSTYRVVSVLTVLHQDWLNGKEYKCAVSNKALPAPIEKTISKAKGQPREPQVYTLPPSRDELTKNQVSLTCLVKGFYPSDIAVEWESNGQPENNYKTTPPVLDSDGSFFLYSKLTVDKSRWQQGNVFSCSVMHEALHNHYTQKSLSLSPGK

SEQ ID NO: 55 - protein, 232 aa, Artificial Sequence
  Human IgG1 Fc_S239D/H268D/E293A/K322A(X3-KE) amino acid sequence
EPKSCDKTHTCPPCPAPELLGGPDVFLFPPKPKDTLMISRTPEVTCVVVDVSDEDPEVKFNWYVDGVEVHNAKTKPRAEQYNSTYRVVSVLTVLHQDWLNGKEYKCAVSNKALPAPIEKTISKAKGQPREPQVYTLPPSRDELTKNQVSLTCLVKGFYPSDIAVEWESNGQPENNYKTTPPVLDSDGSFFLYSKLTVDKSRWQQGNVFSCSVMHEALHNHYTQKSLSLSPGK

SEQ ID NO: 56 - protein, 232 aa, Artificial Sequence
  Human IgG1 Fc_S239D/H268D/K322A/I332E(X3-KI) amino acid sequence
EPKSCDKTHTCPPCPAPELLGGPDVFLFPPKPKDTLMISRTPEVTCVVVDVSDEDPEVKFNWYVDGVEVHNAKTKPREEQYNSTYRVVSVLTVLHQDWLNGKEYKCAVSNKALPAPEEKTISKAKGQPREPQVYTLPPSRDELTKNQVSLTCLVKGFYPSDIAVEWESNGQPENNYKTTPPVLDSDGSFFLYSKLTVDKSRWQQGNVFSCSVMHEALHNHYTQKSLSLSPGK

SEQ ID NO: 57 - protein, 232 aa, Artificial Sequence
  Human IgG1 Fc_S239D/H268D/L328Y/K322A(X3-KL) amino acid sequence
EPKSCDKTHTCPPCPAPELLGGPDVFLFPPKPKDTLMISRTPEVTCVVVDVSDEDPEVKFNWYVDGVEVHNAKTKPREEQYNSTYRVVSVLTVLHQDWLNGKEYKCAVSNKAYPAPIEKTISKAKGQPREPQVYTLPPSRDELTKNQVSLTCLVKGFYPSDIAVEWESNGQPENNYKTTPPVLDSDGSFFLYSKLTVDKSRWQQGNVFSCSVMHEALHNHYTQKSLSLSPGK

SEQ ID NO: 58 - protein, 232 aa, Artificial Sequence
  Human IgG1 Fc_S239D/S267G/H268D/K322A(X3-KS) amino acid sequence
EPKSCDKTHTCPPCPAPELLGGPDVFLFPPKPKDTLMISRTPEVTCVVVDVGDEDPEVKFNWYVDGVEVHNAKTKPREEQYNSTYRVVSVLTVLHQDWLNGKEYKCAVSNKALPAPIEKTISKAKGQPREPQVYTLPPSRDELTKNQVSLTCLVKGFYPSDIAVEWESNGQPENNYKTTPPVLDSDGSFFLYSKLTVDKSRWQQGNVFSCSVMHEALHNHYTQKSLSLSPGK

SEQ ID NO: 59 - protein, 232 aa, Artificial Sequence
  Human IgG1 Fc_S239D/S267G/H268D/K322A/I332E(X3-KSI) amino acid sequence
EPKSCDKTHTCPPCPAPELLGGPDVFLFPPKPKDTLMISRTPEVTCVVVDVGDEDPEVKFNWYVDGVEVHNAKTKPREEQYNSTYRVVSVLTVLHQDWLNGKEYKCAVSNKALPAPEEKTISKAKGQPREPQVYTLPPSRDELTKNQVSLTCLVKGFYPSDIAVEWESNGQPENNYKTTPPVLDSDGSFFLYSKLTVDKSRWQQGNVFSCSVMHEALHNHYTQKSLSLSPGK

SEQ ID NO: 60 - protein, 232 aa, Artificial Sequence
  Human IgG1 Fc_S239D/S267G/H268D/L328Y/K322A(X3-KSL) amino acid sequence
EPKSCDKTHTCPPCPAPELLGGPDVFLFPPKPKDTLMISRTPEVTCVVVDVGDEDPEVKFNWYVDGVEVHNAKTKPREEQYNSTYRVVSVLTVLHQDWLNGKEYKCAVSNKAYPAPIEKTISKAKGQPREPQVYTLPPSRDELTKNQVSLTCLVKGFYPSDIAVEWESNGQPENNYKTTPPVLDSDGSFFLYSKLTVDKSRWQQGNVFSCSVMHEALHNHYTQKSLSLSPGK

SEQ ID NO: 61 - protein, 232 aa, Artificial Sequence
  Human IgG1 Fc_S239D/H268D/L328Y/I332E(X4) amino acid sequence
EPKSCDKTHTCPPCPAPELLGGPDVFLFPPKPKDTLMISRTPEVTCVVVDVSDEDPEVKFNWYVDGVEVHNAKTKPREEQYNSTYRVVSVLTVLHQDWLNGKEYKCKVSNKAYPAPEEKTISKAKGQPREPQVYTLPPSRDELTKNQVSLTCLVKGFYPSDIAVEWESNGQPENNYKTTPPVLDSDGSFFLYSKLTVDKSRWQQGNVFSCSVMHEALHNHYTQKSLSLSPGK

SEQ ID NO: 62 - protein, 232 aa, Artificial Sequence
  Human IgG1 Fc_S239D/H268D/K322A/L328Y/I332E(X4-K) amino acid sequence
EPKSCDKTHTCPPCPAPELLGGPDVFLFPPKPKDTLMISRTPEVTCVVVDVSDEDPEVKFNWYVDGVEVHNAKTKPREEQYNSTYRVVSVLTVLHQDWLNGKEYKCAVSNKAYPAPEEKTISKAKGQPREPQVYTLPPSRDELTKNQVSLTCLVKGFYPSDIAVEWESNGQPENNYKTTPPVLDSDGSFFLYSKLTVDKSRWQQGNVFSCSVMHEALHNHYTQKSLSLSPGK

SEQ ID NO: 63 - protein, 232 aa, Artificial Sequence
  Human IgG1 Fc_S239D/S267G/H268D/K322A/L328Y/I332E(X4-KS) amino acid sequence
EPKSCDKTHTCPPCPAPELLGGPDVFLFPPKPKDTLMISRTPEVTCVVVDVGDEDPEVKFNWYVDGVEVHNAKTKPREEQYNSTYRVVSVLTVLHQDWLNGKEYKCAVSNKAYPAPEEKTISKAKGQPREPQVYTLPPSRDELTKNQVSLTCLVKGFYPSDIAVEWESNGQPENNYKTTPPVLDSDGSFFLYSKLTVDKSRWQQGNVFSCSVMHEALHNHYTQKSLSLSPGK

SEQ ID NO: 64 - protein, 229 aa, Homo sapiens
ESKYGPPCPSCPAPEFLGGPSVFLFPPKPKDTLMISRTPEVTCVVVDVSQEDPEVQFNWYVDGVEVHNAKTKPREEQFNSTYRVVSVLTVLHQDWLNGKEYKCKVSNKGLPSSIEKTISKAKGQPREPQVYTLPPSQEEMTKNQVSLTCLVKGFYPSDIAVEWESNGQPENNYKTTPPVLDSDGSFFLYSRLTVDKSRWQEGNVFSCSVMHEALHNHYTQKSLSLSPGR

SEQ ID NO: 65 - protein, 229 aa, Artificial Sequence
  Human IgG4 Fc_S228P amino acid sequence
ESKYGPPCPPCPAPEFLGGPSVFLFPPKPKDTLMISRTPEVTCVVVDVSQEDPEVQFNWYVDGVEVHNAKTKPREEQFNSTYRVVSVLTVLHQDWLNGKEYKCKVSNKGLPSSIEKTISKAKGQPREPQVYTLPPSQEEMTKNQVSLTCLVKGFYPSDIAVEWESNGQPENNYKTTPPVLDSDGSFFLYSRLTVDKSRWQEGNVFSCSVMHEALHNHYTQKSLSLSPGR

SEQ ID NO: 66 - protein, 229 aa, Artificial Sequence
  Human IgG4 Fc_S228P/G236D/Q268D(X2-P) amino acid sequence
ESKYGPPCPPCPAPEFLDGPSVFLFPPKPKDTLMISRTPEVTCVVVDVSDEDPEVQFNWYVDGVEVHNAKTKPREEQFNSTYRVVSVLTVLHQDWLNGKEYKCKVSNKGLPSSIEKTISKAKGQPREPQVYTLPPSQEEMTKNQVSLTCLVKGFYPSDIAVEWESNGQPENNYKTTPPVLDSDGSFFLYSRLTVDKSRWQEGNVFSCSVMHEALHNHYTQKSLSLSPGR

SEQ ID NO: 67 - protein, 229 aa, Artificial Sequence
  Human IgG4 Fc_S228P/S239D/Q268D(X3-P) amino acid sequence
ESKYGPPCPPCPAPEFLGGPDVFLFPPKPKDTLMISRTPEVTCVVVDVSDEDPEVQFNWYVDGVEVHNAKTKPREEQFNSTYRVVSVLTVLHQDWLNGKEYKCKVSNKGLPSSIEKTISKAKGQPREPQVYTLPPSQEEMTKNQVSLTCLVKGFYPSDIAVEWESNGQPENNYKTTPPVLDSDGSFFLYSRLTVDKSRWQEGNVFSCSVMHEALHNHYTQKSLSLSPGR

SEQ ID NO: 68 - protein, 229 aa, Artificial Sequence
  Human IgG4 Fc_S228P/S239D/Q268D/L328Y/I332E(X4-P) amino acid sequence
ESKYGPPCPPCPAPEFLGGPDVFLFPPKPKDTLMISRTPEVTCVVVDVSDEDPEVQFNWYVDGVEVHNAKTKPREEQFNSTYRVVSVLTVLHQDWLNGKEYKCKVSNKGYPSSEEKTISKAKGQPREPQVYTLPPSQEEMTKNQVSLTCLVKGFYPSDIAVEWESNGQPENNYKTTPPVLDSDGSFFLYSRLTVDKSRWQEGNVFSCSVMHEALHNHYTQKSLSLSPGR

SEQ ID NO: 69 - protein, 447 aa, Mus musculus
QVQLQQSGPELVKPGASVKMSCKASGYTFTSYYIQWVKQRPGQGLEWIGWIYPGDGTTKYNEKFKGKTTLTIDKSSRTAYMLFNSLTSEDSGIYFCASYYGSYFDYWGQGTTLTVSSAKTTAPSVYPLAPVCGDTTGSSVTLGCLVKGYFPEPVTLTWNSGSLSSGVHTFPAVLQSDLYTLSSSVTVTSSTWPSQSITCNVAHPASSTKVDKKIEPRGPTIKPCPPCKCPAPNLLGGPSVFIFPPKIKDVLMISLSPIVTCVVVDVSEDDPDVQISWFVNNVEVHTAQTQTHREDYNSTLRVVSALPIQHQDWMSGKEFKCKVNNKDLPAPIERTISKPKGSVRAPQVYVLPPPEEEMTKKQVTLTCMVTDFMPEDIYVEWTNNGKTELNYKNTEPVLDSDGSYFMYSKLRVEKKNWVERNSYSCSVVHEGLHNHHTTKSFSRTPGK

SEQ ID NO: 70 - DNA, 1341 bp, Mus musculus
caggtgcaactccagcagtctggtcccgaattggtgaaacctggtgcctcagtcaagatgtcttgcaaagcatcagggtatacgtttacctcctactacatccagtgggtgaaacagaggccaggacagggccttgagtggattggctggatttatcccggagatggcacaaccaagtacaacgagaagttcaagggcaaaaccacactgactatcgacaagagctccagaactgcctacatgctcttcaattccctgacaagcgaagatagtggcatctacttttgtgccagctactatgggagctatttcgactattggggtcaagggaccactctgaccgtatcctctgcgaaaactactgccccatcagtctatccccttgctcccgtctgcggtgataccacgggttcctctgtgactcttggttgtctggttaaagggtattttcccgaaccagtcaccctcacatggaatagcgggagcctctcaagtggagtgcacacctttcctgccgtcctgcaatctgacctttacacactttcttcaagcgtgaccgtgacaagtagcacttggccctctcagtccattacttgcaatgttgcacatccagcatcaagtacaaaggtggataagaaaatcgaacccaggggcccaaccatcaaaccctgtccgccatgtaaatgccctgctccaaatctcctgggcggacctagtgtgttcatctttcctcccaaaatcaaagatgtgctgatgatcagtctgagcccaatagtgacctgtgtggtagtggacgtttccgaggatgaccctgacgtccagataagctggtttgtcaacaatgtggaagtgcacacagcccaaacacagacccatcgcgaggactataactccaccctgagggttgtgagcgcactgcccattcagcaccaggactggatgagtgggaaggagttcaaatgcaaggtaaataacaaggatctgcccgccccgattgaacggactatcagcaaaccgaaggggtccgttagagcacctcaggtatacgtgttgccacctccagaggaggaaatgaccaagaaacaggttaccctgacatgcatggtaacggacttcatgcctgaggacatttacgtggagtggacgaataacggcaaaaccgagctgaactacaagaacactgagcctgtcctcgattccgatggctcctatttcatgtactctaagctcagagtggaaaagaagaactgggtggaacgcaatagctactcttgctcagtggtccatgagggcttgcacaatcatcacactactaagtcattctctcggacacccggaaag

SEQ ID NO: 71 - protein, 214 aa, Mus musculus
DIQMTQTTSSLSASLGDRVTISCRASQDISNYLNWYQQKPDGTVTLLIYYTSKLHSGVPSRFSGSGSGTDYSLTITNLEQKDFATYFCQQSSTLPFTFGGGTKLEIKRADAAPTVSIFPPSSEQLTSGGASVVCFLNNFYPKDINVKWKIDGSERQNGVLNSWTDQDSKDSTYSMSSTLTLTKDEYERHNSYTCEATHKTSTSPIVKSFNRNEC

SEQ ID NO: 72 - DNA, 642 bp, Mus musculus
gacattcagatgacccagacaacaagctccctttccgccagtcttggcgatcgggtgaccatcagctgtagagcctcacaagacatctctaactacctgaactggtatcagcagaaacctgatggcacagtcactctgctgatctactacaccagcaaactccactctggtgtgccatctcgcttttcagggagtggatctggcactgactattccctgaccatcaccaatctcgaacagaaggactttgccacgtatttctgccaacagtccagtaccttgcccttcacatttggtggagggacaaagttggagataaagcgagctgatgcagcaccaactgtctccatcttccctcctagcagtgaacagctgactagtggaggagcctctgtggtgtgtttcctcaacaacttctaccccaaagacatcaatgtcaagtggaagatcgatgggtcagaacgtcaaaatggcgtgctgaatagctggacagatcaggatagcaaggactccacttactcaatgagctcaacactgacactgaccaaagacgagtatgagaggcataacagctatacgtgtgaagccacacacaagaccagcacatcaccgattgtgaagagcttcaatcggaatgagtgc

SEQ ID NO: 73 - protein, 447 aa, Mus musculus
QVQLQQSGPELVKPGASVKMSCKASGYTFTSYYIQWVKQRPGQGLEWIGWIYPGDGSSKYNEKFKGKTTLTADKSSSTAYMLLSSLTSEDSGIYFCASYYGSSFDYWGQGTTLTVSSAKTTAPSVYPLAPVCGDTTGSSVTLGCLVKGYFPEPVTLTWNSGSLSSGVHTFPAVLQSDLYTLSSSVTVTSSTWPSQSITCNVAHPASSTKVDKKIEPRGPTIKPCPPCKCPAPNLLGGPSVFIFPPKIKDVLMISLSPIVTCVVVDVSEDDPDVQISWFVNNVEVHTAQTQTHREDYNSTLRVVSALPIQHQDWMSGKEFKCKVNNKDLPAPIERTISKPKGSVRAPQVYVLPPPEEEMTKKQVTLTCMVTDFMPEDIYVEWTNNGKTELNYKNTEPVLDSDGSYFMYSKLRVEKKNWVERNSYSCSVVHEGLHNHHTTKSFSRTPGK

SEQ ID NO: 74 - DNA, 1341 bp, Mus musculus
caggtccagctgcagcaaagtggaccagaactggttaaacccggcgcaagtgtgaagatgagctgtaaggcttcagggtatacatttaccagctactacatccagtgggtaaagcagcgacctggtcaaggcctggagtggatagggtggatttatccgggagatggatccagcaaatataacgagaagttcaagggcaagaccacactgacggccgacaaatctagctcaacggcctacatgctgctcagctccttgacttccgaagattctgggatttacttctgcgcttcctactatggctctagcttcgactattggggccaaggtaccacattgacagtcagctccgcgaaaactactgccccatcagtctatccccttgctcccgtctgcggtgataccacgggttcctctgtgactcttggttgtctggttaaagggtattttcccgaaccagtcaccctcacatggaatagcgggagcctctcaagtggagtgcacacctttcctgccgtcctgcaatctgacctttacacactttcttcaagcgtgaccgtgacaagtagcacttggccctctcagtccattacttgcaatgttgcacatccagcatcaagtacaaaggtggataagaaaatcgaacccaggggcccaaccatcaaaccctgtccgccatgtaaatgccctgctccaaatctcctgggcggacctagtgtgttcatctttcctcccaaaatcaaagatgtgctgatgatcagtctgagcccaatagtgacctgtgtggtagtggacgtttccgaggatgaccctgacgtccagataagctggtttgtcaacaatgtggaagtgcacacagcccaaacacagacccatcgcgaggactataactccaccctgagggttgtgagcgcactgcccattcagcaccaggactggatgagtgggaaggagttcaaatgcaaggtaaataacaaggatctgcccgccccgattgaacggactatcagcaaaccgaaggggtccgttagagcacctcaggtatacgtgttgccacctccagaggaggaaatgaccaagaaacaggttaccctgacatgcatggtaacggacttcatgcctgaggacatttacgtggagtggacgaataacggcaaaaccgagctgaactacaagaacactgagcctgtcctcgattccgatggctcctatttcatgtactctaagctcagagtggaaaagaagaactgggtggaacgcaatagctactcttgctcagtggtccatgagggcttgcacaatcatcacactactaagtcattctctcggacacccggaaag

SEQ ID NO: 75 - protein, 214 aa, Mus musculus
DIQMTQTTSSLSASLGDRVTISCRASQDISNYLNWYQQKPDGTVKFLIYYSSRLHSGVPSRFSGSGSGTDYSLTISNLEQEDIATYFCQQGSTLPFTFGGGTKLEIKRADAAPTVSIFPPSSEQLTSGGASVVCFLNNFYPKDINVKWKIDGSERQNGVLNSWTDQDSKDSTYSMSSTLTLTKDEYERHNSYTCEATHKTSTSPIVKSFNRNEC

SEQ ID NO: 76 - DNA, 642 bp, Mus musculus
gacattcagatgactcagaccacgtcctccttgtccgcctctttgggagatcgcgttaccatctcttgcagagcatctcaggatattagcaactacctgaactggtatcagcagaaacccgatgggacggtgaagttcctcatctactattcctccagacttcactctggggtaccatcacggtttagtggcagtggtagcggcaccgactactctctcaccatttccaaccttgaacaggaggacatagccacctacttttgccaacaagggagcactctgccctttacatttggcggaggtaccaaactggagatcaaacgagctgatgcagcaccaactgtctccatcttccctcctagcagtgaacagctgactagtggaggagcctctgtggtgtgtttcctcaacaacttctaccccaaagacatcaatgtcaagtggaagatcgatgggtcagaacgtcaaaatggcgtgctgaatagctggacagatcaggatagcaaggactccacttactcaatgagctcaacactgacactgaccaaagacgagtatgagaggcataacagctatacgtgtgaagccacacacaagaccagcacatcaccgattgtgaagagcttcaatcggaatgagtgc

SEQ ID NO: 77 - protein, 447 aa, Mus musculus
QVQLQQSGPELVKPGASVKMPCKTSGYTFTSYYIQWLKQRPGQGLEWIGWIYFGDASTKYNEKFKGKTTLTADKSSSTAYMLLSSLTSEDSGIYFCASYYGSYFDYWGQGTTLTVSSAKTTAPSVYPLAPVCGDTTGSSVTLGCLVKGYFPEPVTLTWNSGSLSSGVHTFPAVLQSDLYTLSSSVTVTSSTWPSQSITCNVAHPASSTKVDKKIEPRGPTIKPCPPCKCPAPNLLGGPSVFIFPPKIKDVLMISLSPIVTCVVVDVSEDDPDVQISWFVNNVEVHTAQTQTHREDYNSTLRVVSALPIQHQDWMSGKEFKCKVNNKDLPAPIERTISKPKGSVRAPQVYVLPPPEEEMTKKQVTLTCMVTDFMPEDIYVEWTNNGKTELNYKNTEPVLDSDGSYFMYSKLRVEKKNWVERNSYSCSVVHEGLHNHHTTKSFSRTPGK

SEQ ID NO: 78 - DNA, 1341 bp, Mus musculus
caggttcagctgcagcagagtggtcccgaacttgtgaaacctggtgcctctgtgaaaatgccctgtaagacctctggatacaccttcacaagctactacatacagtggctgaaacagaggccaggacaaggcttggaatggattggctggatctactttggggatgccagtaccaagtacaacgagaagttcaaggggaaaaccacactgacagctgacaagtctagcagtacggcctatatgctgctctcaagcctcacttctgaggattcaggcatctacttttgcgcctcctattatggctcctatttcgactattggggtcaagggactaccttgacagtctccagcgcgaaaactactgccccatcagtctatccccttgctcccgtctgcggtgataccacgggttcctctgtgactcttggttgtctggttaaagggtattttcccgaaccagtcaccctcacatggaatagcgggagcctctcaagtggagtgcacacctttcctgccgtcctgcaatctgacctttacacactttcttcaagcgtgaccgtgacaagtagcacttggccctctcagtccattacttgcaatgttgcacatccagcatcaagtacaaaggtggataagaaaatcgaacccaggggcccaaccatcaaaccctgtccgccatgtaaatgccctgctccaaatctcctgggcggacctagtgtgttcatctttcctcccaaaatcaaagatgtgctgatgatcagtctgagcccaatagtgacctgtgtggtagtggacgtttccgaggatgaccctgacgtccagataagctggtttgtcaacaatgtggaagtgcacacagcccaaacacagacccatcgcgaggactataactccaccctgagggttgtgagcgcactgcccattcagcaccaggactggatgagtgggaaggagttcaaatgcaaggtaaataacaaggatctgcccgccccgattgaacggactatcagcaaaccgaaggggtccgttagagcacctcaggtatacgtgttgccacctccagaggaggaaatgaccaagaaacaggttaccctgacatgcatggtaacggacttcatgcctgaggacatttacgtggagtggacgaataacggcaaaaccgagctgaactacaagaacactgagcctgtcctcgattccgatggctcctatttcatgtactctaagctcagagtggaaaagaagaactgggtggaacgcaatagctactcttgctcagtggtccatgagggcttgcacaatcatcacactactaagtcattctctcggacacccggaaag

SEQ ID NO: 79 - protein, 214 aa, Mus musculus
NIQMTQNTSSLSATLGVRVTISCRASQDISNYLNWYQQKPDGTVKLLIYSTSRLHSGIPSRFSGSGSGTDYSLTISNLEQEDIATYFCQQGSTLPFTFGGGTKLEIKRADAAPTVSIFPPSSEQLTSGGASVVCFLNNFYPKDINVKWKIDGSERQNGVLNSWTDQDSKDSTYSMSSTLTLTKDEYERHNSYTCEATHKTSTSPIVKSFNRNEC

SEQ ID NO: 80 - DNA, 642 bp, Mus musculus
aacattcagatgacccagaataccagctccttgagtgccacattgggcgtgagagtgaccatctcatgtcgagcctctcaggacatcagcaattacctgaactggtatcagcagaaacctgatgggacagtcaagctgctcatctactccacttctcgccttcattccgggattcccagtcgtttctctggctctggatcaggcactgactattcccttaccatcagtaacctggaacaagaggacatagccacgtacttttgccagcaaggtagcactctcccattcacctttggaggtggcacaaagctggagatcaaacgagctgatgcagcaccaactgtctccatcttccctcctagcagtgaacagctgactagtggaggagcctctgtggtgtgtttcctcaacaacttctaccccaaagacatcaatgtcaagtggaagatcgatgggtcagaacgtcaaaatggcgtgctgaatagctggacagatcaggatagcaaggactccacttactcaatgagctcaacactgacactgaccaaagacgagtatgagaggcataacagctatacgtgtgaagccacacacaagaccagcacatcaccgattgtgaagagcttcaatcggaatgagtgc

SEQ ID NO: 81 - protein, 446 aa, Mus musculus
EVLLQQSGPELVKPGASVKIPCKASGYTFTDYNVDWVRQSHGKSLEWIGDIDPNNGGTIYNQKFKDKATLTVDKSSRTAYMELRSLTSEDTAVYYCARWRGAMDYWGQGTSVTVSSAKTTAPSVYPLAPVCGDTTGSSVTLGCLVKGYFPEPVTLTWNSGSLSSGVHTFPAVLQSDLYTLSSSVTVTSSTWPSQSITCNVAHPASSTKVDKKIEPRGPTIKPCPPCKCPAPNLLGGPSVFIFPPKIKDVLMISLSPIVTCVVVDVSEDDPDVQISWFVNNVEVHTAQTQTHREDYNSTLRVVSALPIQHQDWMSGKEFKCKVNNKDLPAPIERTISKPKGSVRAPQVYVLPPPEEEMTKKQVTLTCMVTDFMPEDIYVEWTNNGKTELNYKNTEPVLDSDGSYFMYSKLRVEKKNWVERNSYSCSVVHEGLHNHHTTKSFSRTPGK

SEQ ID NO: 82 - DNA, 1338 bp, Mus musculus
gaagtgctgttgcagcagtcaggtcctgaactcgtcaaaccaggagcatccgtgaagattccctgtaaggcttctgggtataccttcaccgactacaacgtggattgggttcggcagtctcacggcaaaagtctggagtggattggcgacatagatcccaataatggcggaaccatctacaaccagaagttcaaggacaaagccaccctgactgtggacaagtctagccgaacagcctacatggagcttcgcagtctgacttccgaggatactgccgtctactattgcgcacgttggagaggagccatggactattggggccaagggacctcagtgacggttagctccgcgaaaactactgccccatcagtctatccccttgctcccgtctgcggtgataccacgggttcctctgtgactcttggttgtctggttaaagggtattttcccgaaccagtcaccctcacatggaatagcgggagcctctcaagtggagtgcacacctttcctgccgtcctgcaatctgacctttacacactttcttcaagcgtgaccgtgacaagtagcacttggccctctcagtccattacttgcaatgttgcacatccagcatcaagtacaaaggtggataagaaaatcgaacccaggggcccaaccatcaaaccctgtccgccatgtaaatgccctgctccaaatctcctgggcggacctagtgtgttcatctttcctcccaaaatcaaagatgtgctgatgatcagtctgagcccaatagtgacctgtgtggtagtggacgtttccgaggatgaccctgacgtccagataagctggtttgtcaacaatgtggaagtgcacacagcccaaacacagacccatcgcgaggactataactccaccctgagggttgtgagcgcactgcccattcagcaccaggactggatgagtgggaaggagttcaaatgcaaggtaaataacaaggatctgcccgccccgattgaacggactatcagcaaaccgaaggggtccgttagagcacctcaggtatacgtgttgccacctccagaggaggaaatgaccaagaaacaggttaccctgacatgcatggtaacggacttcatgcctgaggacatttacgtggagtggacgaataacggcaaaaccgagctgaactacaagaacactgagcctgtcctcgattccgatggctcctatttcatgtactctaagctcagagtggaaaagaagaactgggtggaacgcaatagctactcttgctcagtggtccatgagggcttgcacaatcatcacactactaagtcattctctcggacacccggaaag

SEQ ID NO: 83 - protein, 214 aa, Mus musculus
DVQMTQTTSSLSASLGDRVTISCRASQDIDNYLKWYQQKPDGTVKLLIYDTSRLHSGVPSRFSGSGSGTDYSLTISNLKQEDIATYFCQQGYTLPWTFGGGTRLEIKRADAAPTVSIFPPSSEQLTSGGASVVCFLNNFYPKDINVKWKIDGSERQNGVLNSWTDQDSKDSTYSMSSTLTLTKDEYERHNSYTCEATHKTSTSPIVKSFNRNEC

SEQ ID NO: 84 - DNA, 642 bp, Mus musculus
gatgtgcagatgacacagaccacatctagccttagtgcctcattgggcgatagagtgaccatttcctgtcgtgcctcccaagacatcgacaactacctgaagtggtatcagcagaaacccgatggcactgtcaagctgctgatctacgacacatcacggttgcacagtggggtaccttcccgcttttctggcagcggatctggtaccgactatagcctgactatctccaatctgaagcaggaggacattgccacctacttctgccagcaaggctatacgctcccatggacttttggaggtggaactcgactcgaaatcaaacgagctgatgcagcaccaactgtctccatcttccctcctagcagtgaacagctgactagtggaggagcctctgtggtgtgtttcctcaacaacttctaccccaaagacatcaatgtcaagtggaagatcgatgggtcagaacgtcaaaatggcgtgctgaatagctggacagatcaggatagcaaggactccacttactcaatgagctcaacactgacactgaccaaagacgagtatgagaggcataacagctatacgtgtgaagccacacacaagaccagcacatcaccgattgtgaagagcttcaatcggaatgagtgc

SEQ ID NO: 85 - protein, 447 aa, Artificial Sequence
  chimeric HM242-IgG1-K322A Heavy Chain PRT
QVQLQQSGPELVKPGASVKMSCKASGYTFTSYYIQWVKQRPGQGLEWIGWIYPGDGTTKYNEKFKGKTTLTIDKSSRTAYMLFNSLTSEDSGIYFCASYYGSYFDYWGQGTTLTVSSASTKGPSVFPLAPSSKSTSGGTAALGCLVKDYFPEPVTVSWNSGALTSGVHTFPAVLQSSGLYSLSSVVTVPSSSLGTQTYICNVNHKPSNTKVDKKVEPKSCDKTHTCPPCPAPELLGGPSVFLFPPKPKDTLMISRTPEVTCVVVDVSHEDPEVKFNWYVDGVEVHNAKTKPREEQYNSTYRVVSVLTVLHQDWLNGKEYKCAVSNKALPAPIEKTISKAKGQPREPQVYTLPPSRDELTKNQVSLTCLVKGFYPSDIAVEWESNGQPENNYKTTPPVLDSDGSFFLYSKLTVDKSRWQQGNVFSCSVMHEALHNHYTQKSLSLSPGK

SEQ ID NO: 86 - DNA, 1341 bp, Artificial Sequence
  chimeric HM242-IgG1-K322A Heavy Chain DNA
caggtgcaactccagcagtctggtcccgaattggtgaaacctggtgcctcagtcaagatgtcttgcaaagcatcagggtatacgtttacctcctactacatccagtgggtgaaacagaggccaggacagggccttgagtggattggctggatttatcccggagatggcacaaccaagtacaacgagaagttcaagggcaaaaccacactgactatcgacaagagctccagaactgcctacatgctcttcaattccctgacaagcgaagatagtggcatctacttttgtgccagctactatgggagctatttcgactattggggtcaagggaccactctgaccgtatcctctgcgtcgaccaagggcccctccgtgttccccctggccccctcctccaagtccacctccggcggcaccgccgccctgggctgcctggtgaaggactacttccccgagcccgtgaccgtgtcctggaactccggcgccctgacctccggcgtgcacaccttccccgccgtgctccagtcctccggcctgtactccctgtcctccgtggtgaccgtgccctcctcctccctgggcacccagacctacatctgcaacgtgaaccacaagccctccaacaccaaggtggacaagaaggtcgagcccaagtcctgcgacaagacccacacctgccccccctgccccgcccccgagctgctgggcggcccctccgtgttcctgttcccccccaagcccaaggacaccctgatgatctccaggacccccgaggtgacctgcgtggtggtggacgtgtcccacgaggaccccgaggtgaagttcaactggtacgtggacggcgtggaggtgcacaacgccaagaccaagcccagggaggagcagtacaactccacctacagggtggtgtccgtgctgaccgtgctgcaccaggactggctgaacggcaaggagtacaagtgcgccgtgtccaacaaggccctgcccgcccccatcgagaagaccatctccaaggccaagggccagcccagggagccccaggtgtacaccctgcccccctccagggacgagctgaccaagaaccaggtgtccctgacctgcctggtgaagggcttctacccctccgacatcgccgtggagtgggagtccaacggccagcccgagaacaactacaagaccaccccccccgtgctggactccgacggctccttcttcctgtactccaagctgaccgtggacaagtccaggtggcagcagggcaacgtgttctcctgctccgtgatgcacgaggccctgcacaaccactacacccagaagtccctgtccctgtcccccggcaag

SEQ ID NO: 87 - protein, 214 aa, Artificial Sequence
  chimeric HM242-IgG1-K322A Light Chain PRT
DIQMTQTTSSLSASLGDRVTISCRASQDISNYLNWYQQKPDGTVTLLIYYTSKLHSGVPSRFSGSGSGTDYSLTITNLEQKDFATYFCQQSSTLPFTFGGGTKLEIKRTVAAPSVFIFPPSDEQLKSGTASVVCLLNNFYPREAKVQWKVDNALQSGNSQESVTEQDSKDSTYSLSSTLTLSKADYEKHKVYACEVTHQGLSSPVTKSFNRGEC

SEQ ID NO: 88 - DNA, 642 bp, Artificial Sequence
  chimeric HM242-IgG1-K322A Light Chain DNA
gacattcagatgacccagacaacaagctccctttccgccagtcttggcgatcgggtgaccatcagctgtagagcctcacaagacatctctaactacctgaactggtatcagcagaaacctgatggcacagtcactctgctgatctactacaccagcaaactccactctggtgtgccatctcgcttttcagggagtggatctggcactgactattccctgaccatcaccaatctcgaacagaaggactttgccacgtatttctgccaacagtccagtaccttgcccttcacatttggtggagggacaaagttggagataaagcgaactgtagccgcaccaagcgtgttcatctttccgccatccgatgaacagctgaagtcaggcacagcgtcagttgtctgtctcctcaacaacttctaccccagagaggccaaagtgcagtggaaagtggacaatgccctgcagtcaggcaattctcaggaatctgtgacagagcaggactccaaagacagtacctatagcctgtctagcacactgacgctctctaaggccgactatgagaagcacaaggtctatgcctgtgaagtgacacatcaagggctgagcagtccagtcactaagagcttcaatcgtggggaatgc

SEQ ID NO: 89 - protein, 447 aa, Artificial Sequence
  chimeric HM266-IgG1-K322A Heavy Chain PRT
QVQLQQSGPELVKPGASVKMSCKASGYTFTSYYIQWVKQRPGQGLEWIGWIYPGDGSSKYNEKFKGKTTLTADKSSSTAYMLLSSLTSEDSGIYFCASYYGSSFDYWGQGTTLTVSSASTKGPSVFPLAPSSKSTSGGTAALGCLVKDYFPEPVTVSWNSGALTSGVHTFPAVLQSSGLYSLSSVVTVPSSSLGTQTYICNVNHKPSNTKVDKKVEPKSCDKTHTCPPCPAPELLGGPSVFLFPPKPKDTLMISRTPEVTCVVVDVSHEDPEVKFNWYVDGVEVHNAKTKPREEQYNSTYRVVSVLTVLHQDWLNGKEYKCAVSNKALPAPIEKTISKAKGQPREPQVYTLPPSRDELTKNQVSLTCLVKGFYPSDIAVEWESNGQPENNYKTTPPVLDSDGSFFLYSKLTVDKSRWQQGNVFSCSVMHEALHNHYTQKSLSLSPGK

SEQ ID NO: 90 - DNA, 1341 bp, Artificial Sequence
  chimeric HM266-IgG1-K322A Heavy Chain DNA
caggtccagctgcagcaaagtggaccagaactggttaaacccggcgcaagtgtgaagatgagctgtaaggcttcagggtatacatttaccagctactacatccagtgggtaaagcagcgacctggtcaaggcctggagtggatagggtggatttatccgggagatggatccagcaaatataacgagaagttcaagggcaagaccacactgacggccgacaaatctagctcaacggcctacatgctgctcagctccttgacttccgaagattctgggatttacttctgcgcttcctactatggctctagcttcgactattggggccaaggtaccacattgacagtcagctccgcgtcgaccaagggcccctccgtgttccccctggccccctcctccaagtccacctccggcggcaccgccgccctgggctgcctggtgaaggactacttccccgagcccgtgaccgtgtcctggaactccggcgccctgacctccggcgtgcacaccttccccgccgtgctccagtcctccggcctgtactccctgtcctccgtggtgaccgtgccctcctcctccctgggcacccagacctacatctgcaacgtgaaccacaagccctccaacaccaaggtggacaagaaggtcgagcccaagtcctgcgacaagacccacacctgccccccctgccccgcccccgagctgctgggcggcccctccgtgttcctgttcccccccaagcccaaggacaccctgatgatctccaggacccccgaggtgacctgcgtggtggtggacgtgtcccacgaggaccccgaggtgaagttcaactggtacgtggacggcgtggaggtgcacaacgccaagaccaagcccagggaggagcagtacaactccacctacagggtggtgtccgtgctgaccgtgctgcaccaggactggctgaacggcaaggagtacaagtgcgccgtgtccaacaaggccctgcccgcccccatcgagaagaccatctccaaggccaagggccagcccagggagccccaggtgtacaccctgcccccctccagggacgagctgaccaagaaccaggtgtccctgacctgcctggtgaagggcttctacccctccgacatcgccgtggagtgggagtccaacggccagcccgagaacaactacaagaccaccccccccgtgctggactccgacggctccttcttcctgtactccaagctgaccgtggacaagtccaggtggcagcagggcaacgtgttctcctgctccgtgatgcacgaggccctgcacaaccactacacccagaagtccctgtccctgtcccccggcaag

SEQ ID NO: 91 - protein, 214 aa, Artificial Sequence
  chimeric HM266-IgG1-K322A Light Chain PRT
DIQMTQTTSSLSASLGDRVTISCRASQDISNYLNWYQQKPDGTVKFLIYYSSRLHSGVPSRFSGSGSGTDYSLTISNLEQEDIATYFCQQGSTLPFTFGGGTKLEIKRTVAAPSVFIFPPSDEQLKSGTASVVCLLNNFYPREAKVQWKVDNALQSGNSQESVTEQDSKDSTYSLSSTLTLSKADYEKHKVYACEVTHQGLSSPVTKSFNRGEC

SEQ ID NO: 92 - DNA, 642 bp, Artificial Sequence
  chimeric HM266-IgG1-K322A Light Chain DNA
gacattcagatgactcagaccacgtcctccttgtccgcctctttgggagatcgcgttaccatctcttgcagagcatctcaggatattagcaactacctgaactggtatcagcagaaacccgatgggacggtgaagttcctcatctactattcctccagacttcactctggggtaccatcacggtttagtggcagtggtagcggcaccgactactctctcaccatttccaaccttgaacaggaggacatagccacctacttttgccaacaagggagcactctgccctttacatttggcggaggtaccaaactggagatcaaacgaactgtagccgcaccaagcgtgttcatctttccgccatccgatgaacagctgaagtcaggcacagcgtcagttgtctgtctcctcaacaacttctaccccagagaggccaaagtgcagtggaaagtggacaatgccctgcagtcaggcaattctcaggaatctgtgacagagcaggactccaaagacagtacctatagcctgtctagcacactgacgctctctaaggccgactatgagaagcacaaggtctatgcctgtgaagtgacacatcaagggctgagcagtccagtcactaagagcttcaatcgtggggaatgc

SEQ ID NO: 93 - protein, 447 aa, Artificial Sequence
  chimeric HM268-IgG1-K322A Heavy Chain PRT
QVQLQQSGPELVKPGASVKMPCKTSGYTFTSYYIQWLKQRPGQGLEWIGWIYFGDASTKYNEKFKGKTTLTADKSSSTAYMLLSSLTSEDSGIYFCASYYGSYFDYWGQGTTLTVSSASTKGPSVFPLAPSSKSTSGGTAALGCLVKDYFPEPVTVSWNSGALTSGVHTFPAVLQSSGLYSLSSVVTVPSSSLGTQTYICNVNHKPSNTKVDKKVEPKSCDKTHTCPPCPAPELLGGPSVFLFPPKPKDTLMISRTPEVTCVVVDVSHEDPEVKFNWYVDGVEVHNAKTKPREEQYNSTYRVVSVLTVLHQDWLNGKEYKCAVSNKALPAPIEKTISKAKGQPREPQVYTLPPSRDELTKNQVSLTCLVKGFYPSDIAVEWESNGQPENNYKTTPPVLDSDGSFFLYSKLTVDKSRWQQGNVFSCSVMHEALHNHYTQKSLSLSPGK

SEQ ID NO: 94 - DNA, 1341 bp, Artificial Sequence
  chimeric HM268-IgG1-K322A Heavy Chain DNA
caggttcagctgcagcagagtggtcccgaacttgtgaaacctggtgcctctgtgaaaatgccctgtaagacctctggatacaccttcacaagctactacatacagtggctgaaacagaggccaggacaaggcttggaatggattggctggatctactttggggatgccagtaccaagtacaacgagaagttcaaggggaaaaccacactgacagctgacaagtctagcagtacggcctatatgctgctctcaagcctcacttctgaggattcaggcatctacttttgcgcctcctattatggctcctatttcgactattggggtcaagggactaccttgacagtctccagcgcgtcgaccaagggcccctccgtgttccccctggccccctcctccaagtccacctccggcggcaccgccgccctgggctgcctggtgaaggactacttccccgagcccgtgaccgtgtcctggaactccggcgccctgacctccggcgtgcacaccttccccgccgtgctccagtcctccggcctgtactccctgtcctccgtggtgaccgtgccctcctcctccctgggcacccagacctacatctgcaacgtgaaccacaagccctccaacaccaaggtggacaagaaggtcgagcccaagtcctgcgacaagacccacacctgccccccctgccccgcccccgagctgctgggcggcccctccgtgttcctgttcccccccaagcccaaggacaccctgatgatctccaggacccccgaggtgacctgcgtggtggtggacgtgtcccacgaggaccccgaggtgaagttcaactggtacgtggacggcgtggaggtgcacaacgccaagaccaagcccagggaggagcagtacaactccacctacagggtggtgtccgtgctgaccgtgctgcaccaggactggctgaacggcaaggagtacaagtgcgccgtgtccaacaaggccctgcccgcccccatcgagaagaccatctccaaggccaagggccagcccagggagccccaggtgtacaccctgcccccctccagggacgagctgaccaagaaccaggtgtccctgacctgcctggtgaagggcttctacccctccgacatcgccgtggagtgggagtccaacggccagcccgagaacaactacaagaccaccccccccgtgctggactccgacggctccttcttcctgtactccaagctgaccgtggacaagtccaggtggcagcagggcaacgtgttctcctgctccgtgatgcacgaggccctgcacaaccactacacccagaagtccctgtccctgtcccccggcaag

SEQ ID NO: 95 - protein, 214 aa, Artificial Sequence
  chimeric HM268-IgG1-K322A Light Chain PRT
NIQMTQNTSSLSATLGVRVTISCRASQDISNYLNWYQQKPDGTVKLLIYSTSRLHSGIPSRFSGSGSGTDYSLTISNLEQEDIATYFCQQGSTLPFTFGGGTKLEIKRTVAAPSVFIFPPSDEQLKSGTASVVCLLNNFYPREAKVQWKVDNALQSGNSQESVTEQDSKDSTYSLSSTLTLSKADYEKHKVYACEVTHQGLSSPVTKSFNRGEC

SEQ ID NO: 96 - DNA, 641 bp, Artificial Sequence
  chimeric HM268-IgG1-K322A Light Chain DNA
aacattcagatgacccagaataccagctccttgagtgccacattgggcgtgagagtgaccatctcatgtcgagcctctcaggacatcagcaattacctgaactggtatcagcagaaacctgatgggacagtcaagctgctcatctactccacttctcgccttcattccgggattcccagtcgtttctctggctctggatcaggcactgactattcccttaccatcagtaacctggaacaagaggacatagccacgtacttttgccagcaaggtagcactctcccattcacctttggaggtggcacaaagctggagatcaaacgaactgtagccgcaccaagcgtgttcatctttccgccatccgatgaacagctgaagtcaggcacagcgtcagttgtctgtctcctcaacaacttctaccccagagaggccaaagtgcagtggaaagtggacaatgccctgcagtcaggcaattctcaggaatctgtgacagagcaggactccaaagacagtacctatagcctgtctagcacactgacgctctctaaggccgactatgagaagcacaaggtctatgcctgtgaagtgacacatcaagggctgagcagtccagtcactaagagcttcaatcgtggggaatg

SEQ ID NO: 97 - protein, 446 aa, Artificial Sequence
  chimeric HM297-IgG1-K322A Heavy Chain PRT
EVLLQQSGPELVKPGASVKIPCKASGYTFTDYNVDWVRQSHGKSLEWIGDIDPNNGGTIYNQKFKDKATLTVDKSSRTAYMELRSLTSEDTAVYYCARWRGAMDYWGQGTSVTVSSASTKGPSVFPLAPSSKSTSGGTAALGCLVKDYFPEPVTVSWNSGALTSGVHTFPAVLQSSGLYSLSSVVTVPSSSLGTQTYICNVNHKPSNTKVDKKVEPKSCDKTHTCPPCPAPELLGGPSVFLFPPKPKDTLMISRTPEVTCVVVDVSHEDPEVKFNWYVDGVEVHNAKTKPREEQYNSTYRVVSVLTVLHQDWLNGKEYKCAVSNKALPAPIEKTISKAKGQPREPQVYTLPPSRDELTKNQVSLTCLVKGFYPSDIAVEWESNGQPENNYKTTPPVLDSDGSFFLYSKLTVDKSRWQQGNVFSCSVMHEALHNHYTQKSLSLSPGK

SEQ ID NO: 98 - DNA, 1338 bp, Artificial Sequence
  chimeric HM297-IgG1-K322A Heavy Chain DNA
gaagtgctgttgcagcagtcaggtcctgaactcgtcaaaccaggagcatccgtgaagattccctgtaaggcttctgggtataccttcaccgactacaacgtggattgggttcggcagtctcacggcaaaagtctggagtggattggcgacatagatcccaataatggcggaaccatctacaaccagaagttcaaggacaaagccaccctgactgtggacaagtctagccgaacagcctacatggagcttcgcagtctgacttccgaggatactgccgtctactattgcgcacgttggagaggagccatggactattggggccaagggacctcagtgacggttagctccgcgtcgaccaagggcccctccgtgttccccctggccccctcctccaagtccacctccggcggcaccgccgccctgggctgcctggtgaaggactacttccccgagcccgtgaccgtgtcctggaactccggcgccctgacctccggcgtgcacaccttccccgccgtgctccagtcctccggcctgtactccctgtcctccgtggtgaccgtgccctcctcctccctgggcacccagacctacatctgcaacgtgaaccacaagccctccaacaccaaggtggacaagaaggtcgagcccaagtcctgcgacaagacccacacctgccccccctgccccgcccccgagctgctgggcggcccctccgtgttcctgttcccccccaagcccaaggacaccctgatgatctccaggacccccgaggtgacctgcgtggtggtggacgtgtcccacgaggaccccgaggtgaagttcaactggtacgtggacggcgtggaggtgcacaacgccaagaccaagcccagggaggagcagtacaactccacctacagggtggtgtccgtgctgaccgtgctgcaccaggactggctgaacggcaaggagtacaagtgcgccgtgtccaacaaggccctgcccgcccccatcgagaagaccatctccaaggccaagggccagcccagggagccccaggtgtacaccctgcccccctccagggacgagctgaccaagaaccaggtgtccctgacctgcctggtgaagggcttctacccctccgacatcgccgtggagtgggagtccaacggccagcccgagaacaactacaagaccaccccccccgtgctggactccgacggctccttcttcctgtactccaagctgaccgtggacaagtccaggtggcagcagggcaacgtgttctcctgctccgtgatgcacgaggccctgcacaaccactacacccagaagtccctgtccctgtcccccggcaag

SEQ ID NO: 99 - protein, 214 aa, Artificial Sequence
  chimeric HM297-IgG1-K322A Light Chain PRT
DVQMTQTTSSLSASLGDRVTISCRASQDIDNYLKWYQQKPDGTVKLLIYDTSRLHSGVPSRFSGSGSGTDYSLTISNLKQEDIATYFCQQGYTLPWTFGGGTRLEIKRTVAAPSVFIFPPSDEQLKSGTASVVCLLNNFYPREAKVQWKVDNALQSGNSQESVTEQDSKDSTYSLSSTLTLSKADYEKHKVYACEVTHQGLSSPVTKSFNRGEC

SEQ ID NO: 100 - DNA, 642 bp, Artificial Sequence
  chimeric HM297-IgG1-K322A Light Chain DNA
gatgtgcagatgacacagaccacatctagccttagtgcctcattgggcgatagagtgaccatttcctgtcgtgcctcccaagacatcgacaactacctgaagtggtatcagcagaaacccgatggcactgtcaagctgctgatctacgacacatcacggttgcacagtggggtaccttcccgcttttctggcagcggatctggtaccgactatagcctgactatctccaatctgaagcaggaggacattgccacctacttctgccagcaaggctatacgctcccatggacttttggaggtggaactcgactcgaaatcaaacgaactgtagccgcaccaagcgtgttcatctttccgccatccgatgaacagctgaagtcaggcacagcgtcagttgtctgtctcctcaacaacttctaccccagagaggccaaagtgcagtggaaagtggacaatgccctgcagtcaggcaattctcaggaatctgtgacagagcaggactccaaagacagtacctatagcctgtctagcacactgacgctctctaaggccgactatgagaagcacaaggtctatgcctgtgaagtgacacatcaagggctgagcagtccagtcactaagagcttcaatcgtggggaatgc

SEQ ID NO: 101 - protein, 446 aa, Artificial Sequence
  chimeric HM624-IgG1-K322A Heavy Chain PRT
EVLLQQSGPELVQPGTSVKIFCKASGYTFTDYNIDWVKQSHGKSHEWIGDIDPNNGGTVYNQKFKGKATLTVDKSSTTAYMELRSLTSEDTAVYYCTRWRGAMDYWGRGTSVTVSSASTKGPSVFPLAPSSKSTSGGTAALGCLVKDYFPEPVTVSWNSGALTSGVHTFPAVLQSSGLYSLSSVVTVPSSSLGTQTYICNVNHKPSNTKVDKKVEPKSCDKTHTCPPCPAPELLGGPSVFLFPPKPKDTLMISRTPEVTCVVVDVSHEDPEVKFNWYVDGVEVHNAKTKPREEQYNSTYRVVSVLTVLHQDWLNGKEYKCAVSNKALPAPIEKTISKAKGQPREPQVYTLPPSRDELTKNQVSLTCLVKGFYPSDIAVEWESNGQPENNYKTTPPVLDSDGSFFLYSKLTVDKSRWQQGNVFSCSVMHEALHNHYTQKSLSLSPGK

SEQ ID NO: 102 - DNA, 1338 bp, Artificial Sequence
  chimeric HM624-IgG1-K322A Heavy Chain DNA
gaggttctccttcagcagtctggccctgaactggtgcaaccagggactagcgtcaagatcttctgcaaagcaagcggatacacgtttaccgactacaacatcgattgggtgaagcagagtcacggcaaatcccacgaatggataggggacattgaccccaataatggcggtaccgtgtacaaccagaagttcaagggcaaagccaccctcactgtggataagtcctctaccacagcctatatggagttgcgaagtctgacctcagaggatacagccgtgtattactgtactcgctggagaggagccatggactattggggtaggggaacctccgtcactgtaagctcagcgtcgaccaagggcccctccgtgttccccctggccccctcctccaagtccacctccggcggcaccgccgccctgggctgcctggtgaaggactacttccccgagcccgtgaccgtgtcctggaactccggcgccctgacctccggcgtgcacaccttccccgccgtgctccagtcctccggcctgtactccctgtcctccgtggtgaccgtgccctcctcctccctgggcacccagacctacatctgcaacgtgaaccacaagccctccaacaccaaggtggacaagaaggtcgagcccaagtcctgcgacaagacccacacctgccccccctgccccgcccccgagctgctgggcggcccctccgtgttcctgttcccccccaagcccaaggacaccctgatgatctccaggacccccgaggtgacctgcgtggtggtggacgtgtcccacgaggaccccgaggtgaagttcaactggtacgtggacggcgtggaggtgcacaacgccaagaccaagcccagggaggagcagtacaactccacctacagggtggtgtccgtgctgaccgtgctgcaccaggactggctgaacggcaaggagtacaagtgcgccgtgtccaacaaggccctgcccgcccccatcgagaagaccatctccaaggccaagggccagcccagggagccccaggtgtacaccctgcccccctccagggacgagctgaccaagaaccaggtgtccctgacctgcctggtgaagggcttctacccctccgacatcgccgtggagtgggagtccaacggccagcccgagaacaactacaagaccaccccccccgtgctggactccgacggctccttcttcctgtactccaagctgaccgtggacaagtccaggtggcagcagggcaacgtgttctcctgctccgtgatgcacgaggccctgcacaaccactacacccagaagtccctgtccctgtcccccggcaag

SEQ ID NO: 103 - protein, 214 aa, Artificial Sequence
  chimeric HM624-IgG1-K322A Light Chain PRT
DIQMTQTTSSLSASLGDRVTISCRASQDVSNYLNWYQQKPDGTVKLLIYDTSKLHSGVPSRFSGSGSGTDYSLTIRDPDQEDIATYFCQQGHTLPWTFGGGTKLEIRRTVAAPSVFIFPPSDEQLKSGTASVVCLLNNFYPREAKVQWKVDNALQSGNSQESVTEQDSKDSTYSLSSTLTLSKADYEKHKVYACEVTHQGLSSPVTKSFNRGEC

SEQ ID NO: 104 - DNA, 642 bp, Artificial Sequence
  chimeric HM624-IgG1-K322A Light Chain DNA
gacatccagatgacacagacaaccagctcattgtccgcctctttgggcgatagggtgacaatctcctgtcgagcctcacaggacgtgtccaattacctgaactggtatcagcagaaacccgatggaacggtcaaactgctgatctacgacacctctaagctccactctggcgttccaagccgttttagcggaagtgggagtggtaccgactatagcctcactatcagagatcccgatcaggaggacattgccacctacttctgccaacaaggccacactcttccttggacctttggtggaggcacaaagctggaaattcggcgaactgtagccgcaccaagcgtgttcatctttccgccatccgatgaacagctgaagtcaggcacagcgtcagttgtctgtctcctcaacaacttctaccccagagaggccaaagtgcagtggaaagtggacaatgccctgcagtcaggcaattctcaggaatctgtgacagagcaggactccaaagacagtacctatagcctgtctagcacactgacgctctctaaggccgactatgagaagcacaaggtctatgcctgtgaagtgacacatcaagggctgagcagtccagtcactaagagcttcaatcgtggggaatgc

SEQ ID NO: 105 - protein, 446 aa, Artificial Sequence
  chimeric HM647-IgG1-K322A Heavy Chain PRT
EVLLQQSGPELVKPGASVKITCKASGYTFTDYNMDWVKQSHGKSLEWIGDIDPNNGGTVYNQKFKDKASLTVDKSSSTGYMELRSLTSEDTAVYYCARWRSAMDYWGQGTSVTVSSASTKGPSVFPLAPSSKSTSGGTAALGCLVKDYFPEPVTVSWNSGALTSGVHTFPAVLQSSGLYSLSSVVTVPSSSLGTQTYICNVNHKPSNTKVDKKVEPKSCDKTHTCPPCPAPELLGGPSVFLFPPKPKDTLMISRTPEVTCVVVDVSHEDPEVKFNWYVDGVEVHNAKTKPREEQYNSTYRVVSVLTVLHQDWLNGKEYKCAVSNKALPAPIEKTISKAKGQPREPQVYTLPPSRDELTKNQVSLTCLVKGFYPSDIAVEWESNGQPENNYKTTPPVLDSDGSFFLYSKLTVDKSRWQQGNVFSCSVMHEALHNHYTQKSLSLSPGK

SEQ ID NO: 106 - DNA, 1338 bp, Artificial Sequence
  chimeric HM647-IgG1-K322A Heavy Chain DNA
gaggttctgcttcagcagagtggaccagaactggtgaaacctggagcctccgtgaagatcacgtgcaaagcctctggctataccttcaccgactacaacatggactgggtgaagcagagtcatgggaaaagcctggagtggataggcgacatcgatcccaataatggtggcactgtgtacaaccagaagttcaaggataaggccagcttgacagtcgacaaatcctcctctacagggtatatggaactccgctctctgactagcgaggatacagccgtctactactgtgcaaggtggagatcagccatggactattggggtcaaggcacctcagtgaccgttagctccgcgtcgaccaagggcccctccgtgttccccctggccccctcctccaagtccacctccggcggcaccgccgccctgggctgcctggtgaaggactacttccccgagcccgtgaccgtgtcctggaactccggcgccctgacctccggcgtgcacaccttccccgccgtgctccagtcctccggcctgtactccctgtcctccgtggtgaccgtgccctcctcctccctgggcacccagacctacatctgcaacgtgaaccacaagccctccaacaccaaggtggacaagaaggtcgagcccaagtcctgcgacaagacccacacctgccccccctgccccgcccccgagctgctgggcggcccctccgtgttcctgttcccccccaagcccaaggacaccctgatgatctccaggacccccgaggtgacctgcgtggtggtggacgtgtcccacgaggaccccgaggtgaagttcaactggtacgtggacggcgtggaggtgcacaacgccaagaccaagcccagggaggagcagtacaactccacctacagggtggtgtccgtgctgaccgtgctgcaccaggactggctgaacggcaaggagtacaagtgcgccgtgtccaacaaggccctgcccgcccccatcgagaagaccatctccaaggccaagggccagcccagggagccccaggtgtacaccctgcccccctccagggacgagctgaccaagaaccaggtgtccctgacctgcctggtgaagggcttctacccctccgacatcgccgtggagtgggagtccaacggccagcccgagaacaactacaagaccaccccccccgtgctggactccgacggctccttcttcctgtactccaagctgaccgtggacaagtccaggtggcagcagggcaacgtgttctcctgctccgtgatgcacgaggccctgcacaaccactacacccagaagtccctgtccctgtcccccggcaag

SEQ ID NO: 107 - protein, 214 aa, Artificial Sequence
  chimeric HM647-IgG1-K322A Light Chain PRT
DIQMTQPTSSLSASLGDRVTISCRASQDISNYLNWYQQKPDGTVKLLISYTSRLHSGVPSRFSGSGSGTDYSLTISNLEQVDIATYFCQQYSTLPWTFGGGSKLEIKRTVAAPSVFIFPPSDEQLKSGTASVVCLLNNFYPREAKVQWKVDNALQSGNSQESVTEQDSKDSTYSLSSTLTLSKADYEKHKVYACEVTHQGLSSPVTKSFNRGEC

SEQ ID NO: 108 - DNA, 642 bp, Artificial Sequence
  chimeric HM647-IgG1-K322A Light Chain DNA
gacatccagatgacacaacccacgtctagcttgtctgccagcttgggagatagggtgaccattagctgcagagcctcacaggacatcagcaactacctgaactggtatcagcagaaacccgatgggacagtcaagctgctgatctcctataccagtcgacttcactccggtgttccatcacgcttttctgggtctggcagtggcactgactactcactgaccatttccaatctcgaacaagtggacatagccacctacttctgtcagcagtattccacccttccttggacatttggaggtggcagtaagctggagatcaaacgaactgtagccgcaccaagcgtgttcatctttccgccatccgatgaacagctgaagtcaggcacagcgtcagttgtctgtctcctcaacaacttctaccccagagaggccaaagtgcagtggaaagtggacaatgccctgcagtcaggcaattctcaggaatctgtgacagagcaggactccaaagacagtacctatagcctgtctagcacactgacgctctctaaggccgactatgagaagcacaaggtctatgcctgtgaagtgacacatcaagggctgagcagtccagtcactaagagcttcaatcgtggggaatgc

SEQ ID NO: 109 - protein, 446 aa, Artificial Sequence
  chimeric HM698-IgG1-K322A Heavy Chain PRT
EVLLQQSGPELVKPGASVKIPCKASGYTFTDYNMDWVKQSHGKSLEWIGDIDPNNGGTVYNQKFKGKASLTVDKSSSTAYMELRSLTSEDTAVYYCARWRSAMDYWGQGTSVTVSSASTKGPSVFPLAPSSKSTSGGTAALGCLVKDYFPEPVTVSWNSGALTSGVHTFPAVLQSSGLYSLSSVVTVPSSSLGTQTYICNVNHKPSNTKVDKKVEPKSCDKTHTCPPCPAPELLGGPSVFLFPPKPKDTLMISRTPEVTCVVVDVSHEDPEVKFNWYVDGVEVHNAKTKPREEQYNSTYRVVSVLTVLHQDWLNGKEYKCAVSNKALPAPIEKTISKAKGQPREPQVYTLPPSRDELTKNQVSLTCLVKGFYPSDIAVEWESNGQPENNYKTTPPVLDSDGSFFLYSKLTVDKSRWQQGNVFSCSVMHEALHNHYTQKSLSLSPGK

SEQ ID NO: 110 - DNA, 1338 bp, Artificial Sequence
  chimeric HM698-IgG1-K322A Heavy Chain DNA
gaagttctgcttcagcagtctggtcctgaactcgtgaagccaggagcatccgtcaagatcccctgcaaagcatctggctataccttcaccgactacaacatggattgggtgaagcagtcacacggcaaaagcctggagtggataggggacattgatcccaataatggcggaacagtgtacaaccagaagttcaagggcaaagcctctttgactgtggacaaaagctcctcaacggcctatatggagctgaggagtctgaccagtgaggatactgccgtgtactactgtgcacgctggagaagtgccatggactattggggacaagggacatccgtcaccgttagctccgcgtcgaccaagggcccctccgtgttccccctggccccctcctccaagtccacctccggcggcaccgccgccctgggctgcctggtgaaggactacttccccgagcccgtgaccgtgtcctggaactccggcgccctgacctccggcgtgcacaccttccccgccgtgctccagtcctccggcctgtactccctgtcctccgtggtgaccgtgccctcctcctccctgggcacccagacctacatctgcaacgtgaaccacaagccctccaacaccaaggtggacaagaaggtcgagcccaagtcctgcgacaagacccacacctgccccccctgccccgcccccgagctgctgggcggcccctccgtgttcctgttcccccccaagcccaaggacaccctgatgatctccaggacccccgaggtgacctgcgtggtggtggacgtgtcccacgaggaccccgaggtgaagttcaactggtacgtggacggcgtggaggtgcacaacgccaagaccaagcccagggaggagcagtacaactccacctacagggtggtgtccgtgctgaccgtgctgcaccaggactggctgaacggcaaggagtacaagtgcgccgtgtccaacaaggccctgcccgcccccatcgagaagaccatctccaaggccaagggccagcccagggagccccaggtgtacaccctgcccccctccagggacgagctgaccaagaaccaggtgtccctgacctgcctggtgaagggcttctacccctccgacatcgccgtggagtgggagtccaacggccagcccgagaacaactacaagaccaccccccccgtgctggactccgacggctccttcttcctgtactccaagctgaccgtggacaagtccaggtggcagcagggcaacgtgttctcctgctccgtgatgcacgaggccctgcacaaccactacacccagaagtccctgtccctgtcccccggcaag

SEQ ID NO: 111 - protein, 214 aa, Artificial Sequence
  chimeric HM698-IgG1-K322A Light Chain PRT
DIQMTQTTSSLSASLGDRVTISCRASQDISNYLNWYQQKPDGTVKLLIYYTSRLHSGVPSRFSGSGSGTDYSLTISNLEQEDIATYFCQQYNTLPWTFGGGTKLEIKRTVAAPSVFIFPPSDEQLKSGTASVVCLLNNFYPREAKVQWKVDNALQSGNSQESVTEQDSKDSTYSLSSTLTLSKADYEKHKVYACEVTHQGLSSPVTKSFNRGEC

SEQ ID NO: 112 - DNA, 642 bp, Artificial Sequence
  chimeric HM698-IgG1-K322A Light Chain DNA
gacatacagatgacccaaacgactagttccctttctgcctcattgggcgatcgagtgaccatttcctgtagagccagtcaggacatcagcaattacctgaactggtatcagcagaaacccgatgggactgtgaagctgctgatctactacacatcaaggctgcatagcggcgttccatctcggtttagcggaagtggctctggaaccgactattccctcactatctccaatctggaacaggaggatattgccacctatttctgccaacagtacaacacactcccttggacctttggaggtgggacaaagttggagatcaaacgaactgtagccgcaccaagcgtgttcatctttccgccatccgatgaacagctgaagtcaggcacagcgtcagttgtctgtctcctcaacaacttctaccccagagaggccaaagtgcagtggaaagtggacaatgccctgcagtcaggcaattctcaggaatctgtgacagagcaggactccaaagacagtacctatagcctgtctagcacactgacgctctctaaggccgactatgagaagcacaaggtctatgcctgtgaagtgacacatcaagggctgagcagtccagtcactaagagcttcaatcgtggggaatgc

SEQ ID NO: 113 - protein, 447 aa, Artificial Sequence
  chimeric HM266-X2 Heavy Chain PRT
QVQLQQSGPELVKPGASVKMSCKASGYTFTSYYIQWVKQRPGQGLEWIGWIYPGDGSSKYNEKFKGKTTLTADKSSSTAYMLLSSLTSEDSGIYFCASYYGSSFDYWGQGTTLTVSSASTKGPSVFPLAPSSKSTSGGTAALGCLVKDYFPEPVTVSWNSGALTSGVHTFPAVLQSSGLYSLSSVVTVPSSSLGTQTYICNVNHKPSNTKVDKKVEPKSCDKTHTCPPCPAPELLDGPSVFLFPPKPKDTLMISRTPEVTCVVVDVSDEDPEVKFNWYVDGVEVHNAKTKPREEQYNSTYRVVSVLTVLHQDWLNGKEYKCKVSNKALPAPIEKTISKAKGQPREPQVYTLPPSRDELTKNQVSLTCLVKGFYPSDIAVEWESNGQPENNYKTTPPVLDSDGSFFLYSKLTVDKSRWQQGNVFSCSVMHEALHNHYTQKSLSLSPGK

SEQ ID NO: 114 - DNA, 1341 bp, Artificial Sequence
  chimeric HM266-X2 Heavy Chain DNA
caggtccagctgcagcaaagtggaccagaactggttaaacccggcgcaagtgtgaagatgagctgtaaggcttcagggtatacatttaccagctactacatccagtgggtaaagcagcgacctggtcaaggcctggagtggatagggtggatttatccgggagatggatccagcaaatataacgagaagttcaagggcaagaccacactgacggccgacaaatctagctcaacggcctacatgctgctcagctccttgacttccgaagattctgggatttacttctgcgcttcctactatggctctagcttcgactattggggccaaggtaccacattgacagtcagctccgcgtcgaccaagggcccctccgtgttccccctggccccctcctccaagtccacctccggcggcaccgccgccctgggctgcctggtgaaggactacttccccgagcccgtgaccgtgtcctggaactccggcgccctgacctccggcgtgcacaccttccccgccgtgctccagtcctccggcctgtactccctgtcctccgtggtgaccgtgccctcctcctccctgggcacccagacctacatctgcaacgtgaaccacaagccctccaacaccaaggtggacaagaaggtcgagcccaagtcctgcgacaagacccacacctgccccccctgccccgcccccgagctgctggacggcccctccgtgttcctgttcccccccaagcccaaggacaccctgatgatctccaggacccccgaggtgacctgcgtggtggtggacgtgtccgacgaggaccccgaggtgaagttcaactggtacgtggacggcgtggaggtgcacaacgccaagaccaagcccagggaggagcagtacaactccacctacagggtggtgtccgtgctgaccgtgctgcaccaggactggctgaacggcaaggagtacaagtgcaaggtgtccaacaaggccctgcccgcccccatcgagaagaccatctccaaggccaagggccagcccagggagccccaggtgtacaccctgcccccctccagggacgagctgaccaagaaccaggtgtccctgacctgcctggtgaagggcttctacccctccgacatcgccgtggagtgggagtccaacggccagcccgagaacaactacaagaccaccccccccgtgctggactccgacggctccttcttcctgtactccaagctgaccgtggacaagtccaggtggcagcagggcaacgtgttctcctgctccgtgatgcacgaggccctgcacaaccactacacccagaagtccctgtccctgtcccccggcaag

SEQ ID NO: 115 - protein, 214 aa, Artificial Sequence; identical to SEQ ID NO: 91
  chimeric HM266-X2 Light Chain PRT

SEQ ID NO: 116 - DNA, 642 bp, Artificial Sequence; identical to SEQ ID NO: 92
  chimeric HM266-X2 Light Chain DNA

SEQ ID NO: 117 - protein, 447 aa, Artificial Sequence
  chimeric HM266-X2-K Heavy Chain PRT
QVQLQQSGPELVKPGASVKMSCKASGYTFTSYYIQWVKQRPGQGLEWIGWIYPGDGSSKYNEKFKGKTTLTADKSSSTAYMLLSSLTSEDSGIYFCASYYGSSFDYWGQGTTLTVSSASTKGPSVFPLAPSSKSTSGGTAALGCLVKDYFPEPVTVSWNSGALTSGVHTFPAVLQSSGLYSLSSVVTVPSSSLGTQTYICNVNHKPSNTKVDKKVEPKSCDKTHTCPPCPAPELLDGPSVFLFPPKPKDTLMISRTPEVTCVVVDVSDEDPEVKFNWYVDGVEVHNAKTKPREEQYNSTYRVVSVLTVLHQDWLNGKEYKCAVSNKALPAPIEKTISKAKGQPREPQVYTLPPSRDELTKNQVSLTCLVKGFYPSDIAVEWESNGQPENNYKTTPPVLDSDGSFFLYSKLTVDKSRWQQGNVFSCSVMHEALHNHYTQKSLSLSPGK

SEQ ID NO: 118 - DNA, 1341 bp, Artificial Sequence
  chimeric HM266-X2-K Heavy Chain DNA
caggtccagctgcagcaaagtggaccagaactggttaaacccggcgcaagtgtgaagatgagctgtaaggcttcagggtatacatttaccagctactacatccagtgggtaaagcagcgacctggtcaaggcctggagtggatagggtggatttatccgggagatggatccagcaaatataacgagaagttcaagggcaagaccacactgacggccgacaaatctagctcaacggcctacatgctgctcagctccttgacttccgaagattctgggatttacttctgcgcttcctactatggctctagcttcgactattggggccaaggtaccacattgacagtcagctccgcctccaccaaaggcccctctgtgtttccactggcaccaagctcaaagtcaaccagtggtggaaccgctgctctgggctgtctggttaaggactatttccccgaacctgtaaccgtaagctggaatagtggcgcactgacctccggggtccacacatttcccgccgtgctgcagagttcaggcctctattccctcagctccgtcgtgactgtcccctcctcttcccttggtactcagacttacatctgcaacgtgaaccacaagccctccaacaccaaggtggacaagaaggtcgagcccaagtcctgcgacaagacccacacctgccccccctgccccgcccccgagctgctggacggcccctccgtgttcctgttcccccccaagcccaaggacaccctgatgatctccaggacccccgaggtgacctgcgtggtggtggacgtgtccgacgaggaccccgaggtgaagttcaactggtacgtggacggcgtggaggtgcacaacgccaagaccaagcccagggaggagcagtacaactccacctacagggtggtgtccgtgctgaccgtgctgcaccaggactggctgaacggcaaggagtacaagtgcgccgtgtccaacaaggccctgcccgcccccatcgagaagaccatctccaaggccaagggccagcccagggagccccaggtgtacaccctgcccccctccagggacgagctgaccaagaaccaggtgtccctgacctgcctggtgaagggcttctacccctccgacatcgccgtggagtgggagtccaacggccagcccgagaacaactacaagaccaccccccccgtgctggactccgacggctccttcttcctgtactccaagctgaccgtggacaagtccaggtggcagcagggcaacgtgttctcctgctccgtgatgcacgaggccctgcacaaccactacacccagaagtccctgtccctgtcccccggcaag

SEQ ID NO: 119 - protein, 214 aa, Artificial Sequence; identical to SEQ ID NO: 91
  chimeric HM266-X2-K Light Chain PRT

SEQ ID NO: 120 - DNA, 642 bp, Artificial Sequence; identical to SEQ ID NO: 92
  chimeric HM266-X2-K Light Chain DNA

SEQ ID NO: 121 - protein, 447 aa, Artificial Sequence
  chimeric HM266-X2-KE Heavy Chain PRT
QVQLQQSGPELVKPGASVKMSCKASGYTFTSYYIQWVKQRPGQGLEWIGWIYPGDGSSKYNEKFKGKTTLTADKSSSTAYMLLSSLTSEDSGIYFCASYYGSSFDYWGQGTTLTVSSASTKGPSVFPLAPSSKSTSGGTAALGCLVKDYFPEPVTVSWNSGALTSGVHTFPAVLQSSGLYSLSSVVTVPSSSLGTQTYICNVNHKPSNTKVDKKVEPKSCDKTHTCPPCPAPELLDGPSVFLFPPKPKDTLMISRTPEVTCVVVDVSDEDPEVKFNWYVDGVEVHNAKTKPRAEQYNSTYRVVSVLTVLHQDWLNGKEYKCAVSNKALPAPIEKTISKAKGQPREPQVYTLPPSRDELTKNQVSLTCLVKGFYPSDIAVEWESNGQPENNYKTTPPVLDSDGSFFLYSKLTVDKSRWQQGNVFSCSVMHEALHNHYTQKSLSLSPGK

SEQ ID NO: 122 - DNA, 1341 bp, Artificial Sequence
  chimeric HM266-X2-KE Heavy Chain DNA
caggtccagctgcagcaaagtggaccagaactggttaaacccggcgcaagtgtgaagatgagctgtaaggcttcagggtatacatttaccagctactacatccagtgggtaaagcagcgacctggtcaaggcctggagtggatagggtggatttatccgggagatggatccagcaaatataacgagaagttcaagggcaagaccacactgacggccgacaaatctagctcaacggcctacatgctgctcagctccttgacttccgaagattctgggatttacttctgcgcttcctactatggctctagcttcgactattggggccaaggtaccacattgacagtcagctccgcctccaccaaaggcccctctgtgtttccactggcaccaagctcaaagtcaaccagtggtggaaccgctgctctgggctgtctggttaaggactatttccccgaacctgtaaccgtaagctggaatagtggcgcactgacctccggggtccacacatttcccgccgtgctgcagagttcaggcctctattccctcagctccgtcgtgactgtcccctcctcttcccttggtactcagacttacatctgcaacgtgaaccacaagccctccaacaccaaggtggacaagaaggtcgagcccaagtcctgcgacaagacccacacctgccccccctgccccgcccccgagctgctggacggcccctccgtgttcctgttcccccccaagcccaaggacaccctgatgatctccaggacccccgaggtgacctgcgtggtggtggacgtgtccgacgaggaccccgaggtgaagttcaactggtacgtggacggcgtggaggtgcacaacgccaagaccaagcccagggccgagcagtacaactccacctacagggtggtgtccgtgctgaccgtgctgcaccaggactggctgaacggcaaggagtacaagtgcgccgtgtccaacaaggccctgcccgcccccatcgagaagaccatctccaaggccaagggccagcccagggagccccaggtgtacaccctgcccccctccagggacgagctgaccaagaaccaggtgtccctgacctgcctggtgaagggcttctacccctccgacatcgccgtggagtgggagtccaacggccagcccgagaacaactacaagaccaccccccccgtgctggactccgacggctccttcttcctgtactccaagctgaccgtggacaagtccaggtggcagcagggcaacgtgttctcctgctccgtgatgcacgaggccctgcacaaccactacacccagaagtccctgtccctgtcccccggcaag

SEQ ID NO: 123 - protein, 214 aa, Artificial Sequence; identical to SEQ ID NO: 91
  chimeric HM266-X2-KE Light Chain PRT

SEQ ID NO: 124 - DNA, 642 bp, Artificial Sequence; identical to SEQ ID NO: 92
  chimeric HM266-X2-KE Light Chain DNA

SEQ ID NO: 125 - protein, 447 aa, Artificial Sequence
  chimeric HM266-X2-KS Heavy Chain PRT
QVQLQQSGPELVKPGASVKMSCKASGYTFTSYYIQWVKQRPGQGLEWIGWIYPGDGSSKYNEKFKGKTTLTADKSSSTAYMLLSSLTSEDSGIYFCASYYGSSFDYWGQGTTLTVSSASTKGPSVFPLAPSSKSTSGGTAALGCLVKDYFPEPVTVSWNSGALTSGVHTFPAVLQSSGLYSLSSVVTVPSSSLGTQTYICNVNHKPSNTKVDKKVEPKSCDKTHTCPPCPAPELLDGPSVFLFPPKPKDTLMISRTPEVTCVVVDVGDEDPEVKFNWYVDGVEVHNAKTKPREEQYNSTYRVVSVLTVLHQDWLNGKEYKCAVSNKALPAPIEKTISKAKGQPREPQVYTLPPSRDELTKNQVSLTCLVKGFYPSDIAVEWESNGQPENNYKTTPPVLDSDGSFFLYSKLTVDKSRWQQGNVFSCSVMHEALHNHYTQKSLSLSPGK

SEQ ID NO: 126 - DNA, 1341 bp, Artificial Sequence
  chimeric HM266-X2-KS Heavy Chain DNA
caggtccagctgcagcaaagtggaccagaactggttaaacccggcgcaagtgtgaagatgagctgtaaggcttcagggtatacatttaccagctactacatccagtgggtaaagcagcgacctggtcaaggcctggagtggatagggtggatttatccgggagatggatccagcaaatataacgagaagttcaagggcaagaccacactgacggccgacaaatctagctcaacggcctacatgctgctcagctccttgacttccgaagattctgggatttacttctgcgcttcctactatggctctagcttcgactattggggccaaggtaccacattgacagtcagctccgcctccaccaaaggcccctctgtgtttccactggcaccaagctcaaagtcaaccagtggtggaaccgctgctctgggctgtctggttaaggactatttccccgaacctgtaaccgtaagctggaatagtggcgcactgacctccggggtccacacatttcccgccgtgctgcagagttcaggcctctattccctcagctccgtcgtgactgtcccctcctcttcccttggtactcagacttacatctgcaacgtgaaccacaagccctccaacaccaaggtggacaagaaggtcgagcccaagtcctgcgacaagacccacacctgccccccctgccccgcccccgagctgctggacggcccctccgtgttcctgttcccccccaagcccaaggacaccctgatgatctccaggacccccgaggtgacctgcgtggtggtggacgtgggcgacgaggaccccgaggtgaagttcaactggtacgtggacggcgtggaggtgcacaacgccaagaccaagcccagggaggagcagtacaactccacctacagggtggtgtccgtgctgaccgtgctgcaccaggactggctgaacggcaaggagtacaagtgcgccgtgtccaacaaggccctgcccgcccccatcgagaagaccatctccaaggccaagggccagcccagggagccccaggtgtacaccctgcccccctccagggacgagctgaccaagaaccaggtgtccctgacctgcctggtgaagggcttctacccctccgacatcgccgtggagtgggagtccaacggccagcccgagaacaactacaagaccaccccccccgtgctggactccgacggctccttcttcctgtactccaagctgaccgtggacaagtccaggtggcagcagggcaacgtgttctcctgctccgtgatgcacgaggccctgcacaaccactacacccagaagtccctgtccctgtcccccggcaag

SEQ ID NO: 127 - protein, 214 aa, Artificial Sequence; identical to SEQ ID NO: 91
  chimeric HM266-X2-KS Light Chain PRT

SEQ ID NO: 128 - DNA, 642 bp, Artificial Sequence; identical to SEQ ID NO: 92
  chimeric HM266-X2-KS Light Chain DNA

SEQ ID NO: 129 - protein, 447 aa, Artificial Sequence
  chimeric HM266-X3 Heavy Chain PRT
QVQLQQSGPELVKPGASVKMSCKASGYTFTSYYIQWVKQRPGQGLEWIGWIYPGDGSSKYNEKFKGKTTLTADKSSSTAYMLLSSLTSEDSGIYFCASYYGSSFDYWGQGTTLTVSSASTKGPSVFPLAPSSKSTSGGTAALGCLVKDYFPEPVTVSWNSGALTSGVHTFPAVLQSSGLYSLSSVVTVPSSSLGTQTYICNVNHKPSNTKVDKKVEPKSCDKTHTCPPCPAPELLGGPDVFLFPPKPKDTLMISRTPEVTCVVVDVSDEDPEVKFNWYVDGVEVHNAKTKPREEQYNSTYRVVSVLTVLHQDWLNGKEYKCKVSNKALPAPIEKTISKAKGQPREPQVYTLPPSRDELTKNQVSLTCLVKGFYPSDIAVEWESNGQPENNYKTTPPVLDSDGSFFLYSKLTVDKSRWQQGNVFSCSVMHEALHNHYTQKSLSLSPGK

SEQ ID NO: 130 - DNA, 1341 bp, Artificial Sequence
  chimeric HM266-X3 Heavy Chain DNA
caggtccagctgcagcaaagtggaccagaactggttaaacccggcgcaagtgtgaagatgagctgtaaggcttcagggtatacatttaccagctactacatccagtgggtaaagcagcgacctggtcaaggcctggagtggatagggtggatttatccgggagatggatccagcaaatataacgagaagttcaagggcaagaccacactgacggccgacaaatctagctcaacggcctacatgctgctcagctccttgacttccgaagattctgggatttacttctgcgcttcctactatggctctagcttcgactattggggccaaggtaccacattgacagtcagctccgcgtcgaccaagggcccctccgtgttccccctggccccctcctccaagtccacctccggcggcaccgccgccctgggctgcctggtgaaggactacttccccgagcccgtgaccgtgtcctggaactccggcgccctgacctccggcgtgcacaccttccccgccgtgctccagtcctccggcctgtactccctgtcctccgtggtgaccgtgccctcctcctccctgggcacccagacctacatctgcaacgtgaaccacaagccctccaacaccaaggtggacaagaaggtcgagcccaagtcctgcgacaagacccacacctgccccccctgccccgcccccgagctgctgggcggccccgacgtgttcctgttcccccccaagcccaaggacaccctgatgatctccaggacccccgaggtgacctgcgtggtggtggacgtgtccgacgaggaccccgaggtgaagttcaactggtacgtggacggcgtggaggtgcacaacgccaagaccaagcccagggaggagcagtacaactccacctacagggtggtgtccgtgctgaccgtgctgcaccaggactggctgaacggcaaggagtacaagtgcaaggtgtccaacaaggccctgcccgcccccatcgagaagaccatctccaaggccaagggccagcccagggagccccaggtgtacaccctgcccccctccagggacgagctgaccaagaaccaggtgtccctgacctgcctggtgaagggcttctacccctccgacatcgccgtggagtgggagtccaacggccagcccgagaacaactacaagaccaccccccccgtgctggactccgacggctccttcttcctgtactccaagctgaccgtggacaagtccaggtggcagcagggcaacgtgttctcctgctccgtgatgcacgaggccctgcacaaccactacacccagaagtccctgtccctgtcccccggcaag

SEQ ID NO: 131 - protein, 214 aa, Artificial Sequence; identical to SEQ ID NO: 91
  chimeric HM266-X3 Light Chain PRT

SEQ ID NO: 132 - DNA, 642 bp, Artificial Sequence; identical to SEQ ID NO: 92
  chimeric HM266-X3 Light Chain DNA

SEQ ID NO: 133 - protein, 447 aa, Artificial Sequence
  chimeric HM266-X3-K Heavy Chain PRT
QVQLQQSGPELVKPGASVKMSCKASGYTFTSYYIQWVKQRPGQGLEWIGWIYPGDGSSKYNEKFKGKTTLTADKSSSTAYMLLSSLTSEDSGIYFCASYYGSSFDYWGQGTTLTVSSASTKGPSVFPLAPSSKSTSGGTAALGCLVKDYFPEPVTVSWNSGALTSGVHTFPAVLQSSGLYSLSSVVTVPSSSLGTQTYICNVNHKPSNTKVDKKVEPKSCDKTHTCPPCPAPELLGGPDVFLFPPKPKDTLMISRTPEVTCVVVDVSDEDPEVKFNWYVDGVEVHNAKTKPREEQYNSTYRVVSVLTVLHQDWLNGKEYKCAVSNKALPAPIEKTISKAKGQPREPQVYTLPPSRDELTKNQVSLTCLVKGFYPSDIAVEWESNGQPENNYKTTPPVLDSDGSFFLYSKLTVDKSRWQQGNVFSCSVMHEALHNHYTQKSLSLSPGK

SEQ ID NO: 134 - DNA, 1341 bp, Artificial Sequence
  chimeric HM266-X3-K Heavy Chain DNA
caggtccagctgcagcaaagtggaccagaactggttaaacccggcgcaagtgtgaagatgagctgtaaggcttcagggtatacatttaccagctactacatccagtgggtaaagcagcgacctggtcaaggcctggagtggatagggtggatttatccgggagatggatccagcaaatataacgagaagttcaagggcaagaccacactgacggccgacaaatctagctcaacggcctacatgctgctcagctccttgacttccgaagattctgggatttacttctgcgcttcctactatggctctagcttcgactattggggccaaggtaccacattgacagtcagctccgcctccaccaaaggcccctctgtgtttccactggcaccaagctcaaagtcaaccagtggtggaaccgctgctctgggctgtctggttaaggactatttccccgaacctgtaaccgtaagctggaatagtggcgcactgacctccggggtccacacatttcccgccgtgctgcagagttcaggcctctattccctcagctccgtcgtgactgtcccctcctcttcccttggtactcagacttacatctgcaacgtgaaccacaagccctccaacaccaaggtggacaagaaggtcgagcccaagtcctgcgacaagacccacacctgccccccctgccccgcccccgagctgctgggcggccccgacgtgttcctgttcccccccaagcccaaggacaccctgatgatctccaggacccccgaggtgacctgcgtggtggtggacgtgagtgacgaggaccccgaggtgaagttcaactggtacgtggacggcgtggaggtgcacaacgccaagaccaagcccagggaggagcagtacaactccacctacagggtggtgtccgtgctgaccgtgctgcaccaggactggctgaacggcaaggagtacaagtgcgccgtgtccaacaaggccctgcccgcccccatcgagaagaccatctccaaggccaagggccagcccagggagccccaggtgtacaccctgcccccctccagggacgagctgaccaagaaccaggtgtccctgacctgcctggtgaagggcttctacccctccgacatcgccgtggagtgggagtccaacggccagcccgagaacaactacaagaccaccccccccgtgctggactccgacggctccttcttcctgtactccaagctgaccgtggacaagtccaggtggcagcagggcaacgtgttctcctgctccgtgatgcacgaggccctgcacaaccactacacccagaagtccctgtccctgtcccccggcaag

SEQ ID NO: 135 - protein, 214 aa, Artificial Sequence; identical to SEQ ID NO: 91
  chimeric HM266-X3-K Light Chain PRT

SEQ ID NO: 136 - DNA, 642 bp, Artificial Sequence; identical to SEQ ID NO: 92
  chimeric HM266-X3-K Light Chain DNA

SEQ ID NO: 137 - protein, 447 aa, Artificial Sequence
  chimeric HM266-X3-KE Heavy Chain PRT
QVQLQQSGPELVKPGASVKMSCKASGYTFTSYYIQWVKQRPGQGLEWIGWIYPGDGSSKYNEKFKGKTTLTADKSSSTAYMLLSSLTSEDSGIYFCASYYGSSFDYWGQGTTLTVSSASTKGPSVFPLAPSSKSTSGGTAALGCLVKDYFPEPVTVSWNSGALTSGVHTFPAVLQSSGLYSLSSVVTVPSSSLGTQTYICNVNHKPSNTKVDKKVEPKSCDKTHTCPPCPAPELLGGPDVFLFPPKPKDTLMISRTPEVTCVVVDVSDEDPEVKFNWYVDGVEVHNAKTKPRAEQYNSTYRVVSVLTVLHQDWLNGKEYKCAVSNKALPAPIEKTISKAKGQPREPQVYTLPPSRDELTKNQVSLTCLVKGFYPSDIAVEWESNGQPENNYKTTPPVLDSDGSFFLYSKLTVDKSRWQQGNVFSCSVMHEALHNHYTQKSLSLSPGK

SEQ ID NO: 138 - DNA, 1341 bp, Artificial Sequence
  chimeric HM266-X3-KE Heavy Chain DNA
caggtccagctgcagcaaagtggaccagaactggttaaacccggcgcaagtgtgaagatgagctgtaaggcttcagggtatacatttaccagctactacatccagtgggtaaagcagcgacctggtcaaggcctggagtggatagggtggatttatccgggagatggatccagcaaatataacgagaagttcaagggcaagaccacactgacggccgacaaatctagctcaacggcctacatgctgctcagctccttgacttccgaagattctgggatttacttctgcgcttcctactatggctctagcttcgactattggggccaaggtaccacattgacagtcagctccgcctccaccaaaggcccctctgtgtttccactggcaccaagctcaaagtcaaccagtggtggaaccgctgctctgggctgtctggttaaggactatttccccgaacctgtaaccgtaagctggaatagtggcgcactgacctccggggtccacacatttcccgccgtgctgcagagttcaggcctctattccctcagctccgtcgtgactgtcccctcctcttcccttggtactcagacttacatctgcaacgtgaaccacaagccctccaacaccaaggtggacaagaaggtcgagcccaagtcctgcgacaagacccacacctgccccccctgccccgcccccgagctgctgggcggccccgacgtgttcctgttcccccccaagcccaaggacaccctgatgatctccaggacccccgaggtgacctgcgtggtggtggacgtgagtgacgaggaccccgaggtgaagttcaactggtacgtggacggcgtggaggtgcacaacgccaagaccaagcccagggccgagcagtacaactccacctacagggtggtgtccgtgctgaccgtgctgcaccaggactggctgaacggcaaggagtacaagtgcgccgtgtccaacaaggccctgcccgcccccatcgagaagaccatctccaaggccaagggccagcccagggagccccaggtgtacaccctgcccccctccagggacgagctgaccaagaaccaggtgtccctgacctgcctggtgaagggcttctacccctccgacatcgccgtggagtgggagtccaacggccagcccgagaacaactacaagaccaccccccccgtgctggactccgacggctccttcttcctgtactccaagctgaccgtggacaagtccaggtggcagcagggcaacgtgttctcctgctccgtgatgcacgaggccctgcacaaccactacacccagaagtccctgtccctgtcccccggcaag

SEQ ID NO: 139 - protein, 214 aa, Artificial Sequence; identical to SEQ ID NO: 91
  chimeric HM266-X3-KE Light Chain PRT

SEQ ID NO: 140 - DNA, 642 bp, Artificial Sequence; identical to SEQ ID NO: 92
  chimeric HM266-X3-KE Light Chain DNA

SEQ ID NO: 141 - protein, 447 aa, Artificial Sequence
  chimeric HM266-X3-KS Heavy Chain PRT
QVQLQQSGPELVKPGASVKMSCKASGYTFTSYYIQWVKQRPGQGLEWIGWIYPGDGSSKYNEKFKGKTTLTADKSSSTAYMLLSSLTSEDSGIYFCASYYGSSFDYWGQGTTLTVSSASTKGPSVFPLAPSSKSTSGGTAALGCLVKDYFPEPVTVSWNSGALTSGVHTFPAVLQSSGLYSLSSVVTVPSSSLGTQTYICNVNHKPSNTKVDKKVEPKSCDKTHTCPPCPAPELLGGPDVFLFPPKPKDTLMISRTPEVTCVVVDVGDEDPEVKFNWYVDGVEVHNAKTKPREEQYNSTYRVVSVLTVLHQDWLNGKEYKCAVSNKALPAPIEKTISKAKGQPREPQVYTLPPSRDELTKNQVSLTCLVKGFYPSDIAVEWESNGQPENNYKTTPPVLDSDGSFFLYSKLTVDKSRWQQGNVFSCSVMHEALHNHYTQKSLSLSPGK

SEQ ID NO: 142 - DNA, 1341 bp, Artificial Sequence
  chimeric HM266-X3-KS Heavy Chain DNA
caggtccagctgcagcaaagtggaccagaactggttaaacccggcgcaagtgtgaagatgagctgtaaggcttcagggtatacatttaccagctactacatccagtgggtaaagcagcgacctggtcaaggcctggagtggatagggtggatttatccgggagatggatccagcaaatataacgagaagttcaagggcaagaccacactgacggccgacaaatctagctcaacggcctacatgctgctcagctccttgacttccgaagattctgggatttacttctgcgcttcctactatggctctagcttcgactattggggccaaggtaccacattgacagtcagctccgcctccaccaaaggcccctctgtgtttccactggcaccaagctcaaagtcaaccagtggtggaaccgctgctctgggctgtctggttaaggactatttccccgaacctgtaaccgtaagctggaatagtggcgcactgacctccggggtccacacatttcccgccgtgctgcagagttcaggcctctattccctcagctccgtcgtgactgtcccctcctcttcccttggtactcagacttacatctgcaacgtgaaccacaagccctccaacaccaaggtggacaagaaggtcgagcccaagtcctgcgacaagacccacacctgccccccctgccccgcccccgagctgctgggcggccccgacgtgttcctgttcccccccaagcccaaggacaccctgatgatctccaggacccccgaggtgacctgcgtggtggtggacgtgggcgacgaggaccccgaggtgaagttcaactggtacgtggacggcgtggaggtgcacaacgccaagaccaagcccagggaggagcagtacaactccacctacagggtggtgtccgtgctgaccgtgctgcaccaggactggctgaacggcaaggagtacaagtgcgccgtgtccaacaaggccctgcccgcccccatcgagaagaccatctccaaggccaagggccagcccagggagccccaggtgtacaccctgcccccctccagggacgagctgaccaagaaccaggtgtccctgacctgcctggtgaagggcttctacccctccgacatcgccgtggagtgggagtccaacggccagcccgagaacaactacaagaccaccccccccgtgctggactccgacggctccttcttcctgtactccaagctgaccgtggacaagtccaggtggcagcagggcaacgtgttctcctgctccgtgatgcacgaggccctgcacaaccactacacccagaagtccctgtccctgtcccccggcaag

SEQ ID NO: 143 - protein, 214 aa, Artificial Sequence; identical to SEQ ID NO: 91
  chimeric HM266-X3-KS Light Chain PRT

SEQ ID NO: 144 - DNA, 642 bp, Artificial Sequence; identical to SEQ ID NO: 92
  chimeric HM266-X3-KS Light Chain DNA

SEQ ID NO: 145 - protein, 447 aa, Artificial Sequence
  chimeric HM266-X4 Heavy Chain PRT
QVQLQQSGPELVKPGASVKMSCKASGYTFTSYYIQWVKQRPGQGLEWIGWIYPGDGSSKYNEKFKGKTTLTADKSSSTAYMLLSSLTSEDSGIYFCASYYGSSFDYWGQGTTLTVSSASTKGPSVFPLAPSSKSTSGGTAALGCLVKDYFPEPVTVSWNSGALTSGVHTFPAVLQSSGLYSLSSVVTVPSSSLGTQTYICNVNHKPSNTKVDKKVEPKSCDKTHTCPPCPAPELLGGPDVFLFPPKPKDTLMISRTPEVTCVVVDVSDEDPEVKFNWYVDGVEVHNAKTKPREEQYNSTYRVVSVLTVLHQDWLNGKEYKCKVSNKAYPAPEEKTISKAKGQPREPQVYTLPPSRDELTKNQVSLTCLVKGFYPSDIAVEWESNGQPENNYKTTPPVLDSDGSFFLYSKLTVDKSRWQQGNVFSCSVMHEALHNHYTQKSLSLSPGK

SEQ ID NO: 146 - DNA, 1341 bp, Artificial Sequence
  chimeric HM266-X4 Heavy Chain DNA
caggtccagctgcagcaaagtggaccagaactggttaaacccggcgcaagtgtgaagatgagctgtaaggcttcagggtatacatttaccagctactacatccagtgggtaaagcagcgacctggtcaaggcctggagtggatagggtggatttatccgggagatggatccagcaaatataacgagaagttcaagggcaagaccacactgacggccgacaaatctagctcaacggcctacatgctgctcagctccttgacttccgaagattctgggatttacttctgcgcttcctactatggctctagcttcgactattggggccaaggtaccacattgacagtcagctccgcgtcgaccaagggcccctccgtgttccccctggccccctcctccaagtccacctccggcggcaccgccgccctgggctgcctggtgaaggactacttccccgagcccgtgaccgtgtcctggaactccggcgccctgacctccggcgtgcacaccttccccgccgtgctccagtcctccggcctgtactccctgtcctccgtggtgaccgtgccctcctcctccctgggcacccagacctacatctgcaacgtgaaccacaagccctccaacaccaaggtggacaagaaggtcgagcccaagtcctgcgacaagacccacacctgccccccctgccccgcccccgagctgctgggcggccccgacgtgttcctgttcccccccaagcccaaggacaccctgatgatctccaggacccccgaggtgacctgcgtggtggtggacgtgtccgacgaggaccccgaggtgaagttcaactggtacgtggacggcgtggaggtgcacaacgccaagaccaagcccagggaggagcagtacaactccacctacagggtggtgtccgtgctgaccgtgctgcaccaggactggctgaacggcaaggagtacaagtgcaaggtgtccaacaaggcctaccccgcccccgaggagaagaccatctccaaggccaagggccagcccagggagccccaggtgtacaccctgcccccctccagggacgagctgaccaagaaccaggtgtccctgacctgcctggtgaagggcttctacccctccgacatcgccgtggagtgggagtccaacggccagcccgagaacaactacaagaccaccccccccgtgctggactccgacggctccttcttcctgtactccaagctgaccgtggacaagtccaggtggcagcagggcaacgtgttctcctgctccgtgatgcacgaggccctgcacaaccactacacccagaagtccctgtccctgtcccccggcaag

SEQ ID NO: 147 - protein, 214 aa, Artificial Sequence; identical to SEQ ID NO: 91
  chimeric HM266-X4 Light Chain PRT

SEQ ID NO: 148 - DNA, 642 bp, Artificial Sequence; identical to SEQ ID NO: 92
  chimeric HM266-X4 Light Chain DNA

SEQ ID NO: 149 - protein, 447 aa, Artificial Sequence
  chimeric HM266-X4-K Heavy Chain PRT
QVQLQQSGPELVKPGASVKMSCKASGYTFTSYYIQWVKQRPGQGLEWIGWIYPGDGSSKYNEKFKGKTTLTADKSSSTAYMLLSSLTSEDSGIYFCASYYGSSFDYWGQGTTLTVSSASTKGPSVFPLAPSSKSTSGGTAALGCLVKDYFPEPVTVSWNSGALTSGVHTFPAVLQSSGLYSLSSVVTVPSSSLGTQTYICNVNHKPSNTKVDKKVEPKSCDKTHTCPPCPAPELLGGPDVFLFPPKPKDTLMISRTPEVTCVVVDVSDEDPEVKFNWYVDGVEVHNAKTKPREEQYNSTYRVVSVLTVLHQDWLNGKEYKCAVSNKAYPAPEEKTISKAKGQPREPQVYTLPPSRDELTKNQVSLTCLVKGFYPSDIAVEWESNGQPENNYKTTPPVLDSDGSFFLYSKLTVDKSRWQQGNVFSCSVMHEALHNHYTQKSLSLSPGK

SEQ ID NO: 150 - DNA, 1341 bp, Artificial Sequence
  chimeric HM266-X4-K Heavy Chain DNA
caggtccagctgcagcaaagtggaccagaactggttaaacccggcgcaagtgtgaagatgagctgtaaggcttcagggtatacatttaccagctactacatccagtgggtaaagcagcgacctggtcaaggcctggagtggatagggtggatttatccgggagatggatccagcaaatataacgagaagttcaagggcaagaccacactgacggccgacaaatctagctcaacggcctacatgctgctcagctccttgacttccgaagattctgggatttacttctgcgcttcctactatggctctagcttcgactattggggccaaggtaccacattgacagtcagctccgcctccaccaaaggcccctctgtgtttccactggcaccaagctcaaagtcaaccagtggtggaaccgctgctctgggctgtctggttaaggactatttccccgaacctgtaaccgtaagctggaatagtggcgcactgacctccggggtccacacatttcccgccgtgctgcagagttcaggcctctattccctcagctccgtcgtgactgtcccctcctcttcccttggtactcagacttacatctgcaacgtgaaccacaagccctccaacaccaaggtggacaagaaggtcgagcccaagtcctgcgacaagacccacacctgccccccctgccccgcccccgagctgctgggcggccccgacgtgttcctgttcccccccaagcccaaggacaccctgatgatctccaggacccccgaggtgacctgcgtggtggtggacgtgtccgacgaggaccccgaggtgaagttcaactggtacgtggacggcgtggaggtgcacaacgccaagaccaagcccagggaggagcagtacaactccacctacagggtggtgtccgtgctgaccgtgctgcaccaggactggctgaacggcaaggagtacaagtgcgccgtgtccaacaaggcctaccccgcccccgaggagaagaccatctccaaggccaagggccagcccagggagccccaggtgtacaccctgcccccctccagggacgagctgaccaagaaccaggtgtccctgacctgcctggtgaagggcttctacccctccgacatcgccgtggagtgggagtccaacggccagcccgagaacaactacaagaccaccccccccgtgctggactccgacggctccttcttcctgtactccaagctgaccgtggacaagtccaggtggcagcagggcaacgtgttctcctgctccgtgatgcacgaggccctgcacaaccactacacccagaagtccctgtccctgtcccccggcaag

SEQ ID NO: 151 - protein, 214 aa, Artificial Sequence; identical to SEQ ID NO: 91
  chimeric HM266-X4-K Light Chain PRT

SEQ ID NO: 152 - DNA, 642 bp, Artificial Sequence; identical to SEQ ID NO: 92
  chimeric HM266-X4-K Light Chain DNA

SEQ ID NO: 153 - protein, 444 aa, Artificial Sequence
  chimeric HM266-IgG4-S228P Heavy Chain PRT
QVQLQQSGPELVKPGASVKMSCKASGYTFTSYYIQWVKQRPGQGLEWIGWIYPGDGSSKYNEKFKGKTTLTADKSSSTAYMLLSSLTSEDSGIYFCASYYGSSFDYWGQGTTLTVSSASTKGPSVFPLAPCSRSTSESTAALGCLVKDYFPEPVTVSWNSGALTSGVHTFPAVLQSSGLYSLSSVVTVPSSSLGTKTYTCNVDHKPSNTKVDKRVESKYGPPCPPCPAPEFLGGPSVFLFPPKPKDTLMISRTPEVTCVVVDVSQEDPEVQFNWYVDGVEVHNAKTKPREEQFNSTYRVVSVLTVLHQDWLNGKEYKCKVSNKGLPSSIEKTISKAKGQPREPQVYTLPPSQEEMTKNQVSLTCLVKGFYPSDIAVEWESNGQPENNYKTTPPVLDSDGSFFLYSRLTVDKSRWQEGNVFSCSVMHEALHNHYTQKSLSLSPGR

SEQ ID NO: 154 - DNA, 1332 bp, Artificial Sequence
  chimeric HM266-IgG4-S228P Heavy Chain DNA
caggtccagctgcagcaaagtggaccagaactggttaaacccggcgcaagtgtgaagatgagctgtaaggcttcagggtatacatttaccagctactacatccagtgggtaaagcagcgacctggtcaaggcctggagtggatagggtggatttatccgggagatggatccagcaaatataacgagaagttcaagggcaagaccacactgacggccgacaaatctagctcaacggcctacatgctgctcagctccttgacttccgaagattctgggatttacttctgcgcttcctactatggctctagcttcgactattggggccaaggtaccacattgacagtcagctccgcctcaacgaagggtccttctgtctttcccttggcaccttgttctcggtccacaagcgagagcaccgcggctctgggctgcttggtgaaagactacttccccgagcccgttacagtgtcctggaacagtggagctttgacttctggggtgcatactttcccagctgtgctgcagtctagcggactctatagccttagctcagtggtaactgtaccttcttcctcactcgggaccaaaacctacacatgcaatgtggaccacaaacccagtaataccaaagtggacaaacgtgtcgagtccaaatatggcccgccctgtccaccttgtccagctccagaatttctgggaggacctagcgtattcctgtttcctccgaaacctaaggatacgctcatgatttctcgcactcccgaagtgacatgtgttgtggtcgacgtgagtcaagaagatccagaggttcagttcaactggtatgtcgatggggttgaggtccacaatgccaagactaagcctagagaggagcagtttaactccacataccgagtcgtgtcagtgctgaccgtcctgcatcaggactggctcaatgggaaggagtacaaatgcaaagtctccaataagggcctgccaagtagcatagaaaagaccatttcaaaagcgaaaggccaaccccgggaaccccaggtgtataccctgccaccaagccaagaggagatgaccaagaatcaggttagtctcacttgcctggtcaaaggattctatccctctgacatcgccgtcgaatgggagtccaatggccagcccgaaaacaactacaagaccacacctccagttctggacagcgacggtagtttcttcctgtactcacgcctgacagtggacaagagcagatggcaggaaggcaacgtattcagctgctccgtgatgcacgaagccctgcacaatcactacacacagaagagtttgagcctttcccctggtaga

SEQ ID NO: 155 - protein, 214 aa, Artificial Sequence; identical to SEQ ID NO: 91
  chimeric HM266-IgG4-S228P Light Chain PRT

SEQ ID NO: 156 - DNA, 642 bp, Artificial Sequence; identical to SEQ ID NO: 92
  chimeric HM266-IgG4-S228P Light Chain DNA

SEQ ID NO: 157 - protein, 444 aa, Artificial Sequence
  chimeric HM266-X2-P Heavy Chain PRT
QVQLQQSGPELVKPGASVKMSCKASGYTFTSYYIQWVKQRPGQGLEWIGWIYPGDGSSKYNEKFKGKTTLTADKSSSTAYMLLSSLTSEDSGIYFCASYYGSSFDYWGQGTTLTVSSASTKGPSVFPLAPCSRSTSESTAALGCLVKDYFPEPVTVSWNSGALTSGVHTFPAVLQSSGLYSLSSVVTVPSSSLGTKTYTCNVDHKPSNTKVDKRVESKYGPPCPPCPAPEFLDGPSVFLFPPKPKDTLMISRTPEVTCVVVDVSDEDPEVQFNWYVDGVEVHNAKTKPREEQFNSTYRVVSVLTVLHQDWLNGKEYKCKVSNKGLPSSIEKTISKAKGQPREPQVYTLPPSQEEMTKNQVSLTCLVKGFYPSDIAVEWESNGQPENNYKTTPPVLDSDGSFFLYSRLTVDKSRWQEGNVFSCSVMHEALHNHYTQKSLSLSPGR

SEQ ID NO: 158 - DNA, 1332 bp, Artificial Sequence
  chimeric HM266-X2-P Heavy Chain DNA
caggtccagctgcagcaaagtggaccagaactggttaaacccggcgcaagtgtgaagatgagctgtaaggcttcagggtatacatttaccagctactacatccagtgggtaaagcagcgacctggtcaaggcctggagtggatagggtggatttatccgggagatggatccagcaaatataacgagaagttcaagggcaagaccacactgacggccgacaaatctagctcaacggcctacatgctgctcagctccttgacttccgaagattctgggatttacttctgcgcttcctactatggctctagcttcgactattggggccaaggtaccacattgacagtcagctccgcctcaacgaagggtccttctgtctttcccttggcaccttgttctcggtccacaagcgagagcaccgcggctctgggctgcttggtgaaagactacttccccgagcccgttacagtgtcctggaacagtggagctttgacttctggggtgcatactttcccagctgtgctgcagtctagcggactctatagccttagctcagtggtaactgtaccttcttcctcactcgggaccaaaacctacacatgcaatgtggaccacaaacccagtaataccaaagtggacaaacgtgtcgagtccaaatatggcccgccctgtccaccttgtccagctccagaatttctggacggacctagcgtattcctgtttcctccgaaacctaaggatacgctcatgatttctcgcactcccgaagtgacatgtgttgtggtcgacgtgagtgacgaagatccagaggttcagttcaactggtatgtcgatggggttgaggtccacaatgccaagactaagcctagagaggagcagtttaactccacataccgagtcgtgtcagtgctgaccgtcctgcatcaggactggctcaatgggaaggagtacaaatgcaaagtctccaataagggcctgccaagtagcatagaaaagaccatttcaaaagcgaaaggccaaccccgggaaccccaggtgtataccctgccaccaagccaagaggagatgaccaagaatcaggttagtctcacttgcctggtcaaaggattctatccctctgacatcgccgtcgaatgggagtccaatggccagcccgaaaacaactacaagaccacacctccagttctggacagcgacggtagtttcttcctgtactcacgcctgacagtggacaagagcagatggcaggaaggcaacgtattcagctgctccgtgatgcacgaagccctgcacaatcactacacacagaagagtttgagcctttcccctggtaga

SEQ ID NO: 159 - protein, 214 aa, Artificial Sequence; identical to SEQ ID NO: 91
  chimeric HM266-X2-P Light Chain PRT

SEQ ID NO: 160 - DNA, 642 bp, Artificial Sequence; identical to SEQ ID NO: 92
  chimeric HM266-X2-P Light Chain DNA

SEQ ID NO: 161 - protein, 444 aa, Artificial Sequence
  chimeric HM266-X3-P Heavy Chain PRT
QVQLQQSGPELVKPGASVKMSCKASGYTFTSYYIQWVKQRPGQGLEWIGWIYPGDGSSKYNEKFKGKTTLTADKSSSTAYMLLSSLTSEDSGIYFCASYYGSSFDYWGQGTTLTVSSASTKGPSVFPLAPCSRSTSESTAALGCLVKDYFPEPVTVSWNSGALTSGVHTFPAVLQSSGLYSLSSVVTVPSSSLGTKTYTCNVDHKPSNTKVDKRVESKYGPPCPPCPAPEFLGGPDVFLFPPKPKDTLMISRTPEVTCVVVDVSDEDPEVQFNWYVDGVEVHNAKTKPREEQFNSTYRVVSVLTVLHQDWLNGKEYKCKVSNKGLPSSIEKTISKAKGQPREPQVYTLPPSQEEMTKNQVSLTCLVKGFYPSDIAVEWESNGQPENNYKTTPPVLDSDGSFFLYSRLTVDKSRWQEGNVFSCSVMHEALHNHYTQKSLSLSPGR

SEQ ID NO: 162 - DNA, 1332 bp, Artificial Sequence
  chimeric HM266-X3-P Heavy Chain DNA
caggtccagctgcagcaaagtggaccagaactggttaaacccggcgcaagtgtgaagatgagctgtaaggcttcagggtatacatttaccagctactacatccagtgggtaaagcagcgacctggtcaaggcctggagtggatagggtggatttatccgggagatggatccagcaaatataacgagaagttcaagggcaagaccacactgacggccgacaaatctagctcaacggcctacatgctgctcagctccttgacttccgaagattctgggatttacttctgcgcttcctactatggctctagcttcgactattggggccaaggtaccacattgacagtcagctccgcctcaacgaagggtccttctgtctttcccttggcaccttgttctcggtccacaagcgagagcaccgcggctctgggctgcttggtgaaagactacttccccgagcccgttacagtgtcctggaacagtggagctttgacttctggggtgcatactttcccagctgtgctgcagtctagcggactctatagccttagctcagtggtaactgtaccttcttcctcactcgggaccaaaacctacacatgcaatgtggaccacaaacccagtaataccaaagtggacaaacgtgtcgagtccaaatatggcccgccctgtccaccttgtccagctccagaatttctgggaggacctgacgtattcctgtttcctccgaaacctaaggatacgctcatgatttctcgcactcccgaagtgacatgtgttgtggtcgacgtgagtgacgaagatccagaggttcagttcaactggtatgtcgatggggttgaggtccacaatgccaagactaagcctagagaggagcagtttaactccacataccgagtcgtgtcagtgctgaccgtcctgcatcaggactggctcaatgggaaggagtacaaatgcaaagtctccaataagggcctgccaagtagcatagaaaagaccatttcaaaagcgaaaggccaaccccgggaaccccaggtgtataccctgccaccaagccaagaggagatgaccaagaatcaggttagtctcacttgcctggtcaaaggattctatccctctgacatcgccgtcgaatgggagtccaatggccagcccgaaaacaactacaagaccacacctccagttctggacagcgacggtagtttcttcctgtactcacgcctgacagtggacaagagcagatggcaggaaggcaacgtattcagctgctccgtgatgcacgaagccctgcacaatcactacacacagaagagtttgagcctttcccctggtaga

SEQ ID NO: 163 - protein, 214 aa, Artificial Sequence; identical to SEQ ID NO: 91
  chimeric HM266-X3-P Light Chain PRT

SEQ ID NO: 164 - DNA, 642 bp, Artificial Sequence; identical to SEQ ID NO: 92
  chimeric HM266-X3-P Light Chain DNA

SEQ ID NO: 165 - protein, 444 aa, Artificial Sequence
  chimeric HM266-X4-P Heavy Chain PRT
QVQLQQSGPELVKPGASVKMSCKASGYTFTSYYIQWVKQRPGQGLEWIGWIYPGDGSSKYNEKFKGKTTLTADKSSSTAYMLLSSLTSEDSGIYFCASYYGSSFDYWGQGTTLTVSSASTKGPSVFPLAPCSRSTSESTAALGCLVKDYFPEPVTVSWNSGALTSGVHTFPAVLQSSGLYSLSSVVTVPSSSLGTKTYTCNVDHKPSNTKVDKRVESKYGPPCPPCPAPEFLGGPDVFLFPPKPKDTLMISRTPEVTCVVVDVSDEDPEVQFNWYVDGVEVHNAKTKPREEQFNSTYRVVSVLTVLHQDWLNGKEYKCKVSNKGYPSSEEKTISKAKGQPREPQVYTLPPSQEEMTKNQVSLTCLVKGFYPSDIAVEWESNGQPENNYKTTPPVLDSDGSFFLYSRLTVDKSRWQEGNVFSCSVMHEALHNHYTQKSLSLSPGR

SEQ ID NO: 166 - DNA, 1332 bp, Artificial Sequence
  chimeric HM266-X4-P Heavy Chain DNA
caggtccagctgcagcaaagtggaccagaactggttaaacccggcgcaagtgtgaagatgagctgtaaggcttcagggtatacatttaccagctactacatccagtgggtaaagcagcgacctggtcaaggcctggagtggatagggtggatttatccgggagatggatccagcaaatataacgagaagttcaagggcaagaccacactgacggccgacaaatctagctcaacggcctacatgctgctcagctccttgacttccgaagattctgggatttacttctgcgcttcctactatggctctagcttcgactattggggccaaggtaccacattgacagtcagctccgcctcaacgaagggtccttctgtctttcccttggcaccttgttctcggtccacaagcgagagcaccgcggctctgggctgcttggtgaaagactacttccccgagcccgttacagtgtcctggaacagtggagctttgacttctggggtgcatactttcccagctgtgctgcagtctagcggactctatagccttagctcagtggtaactgtaccttcttcctcactcgggaccaaaacctacacatgcaatgtggaccacaaacccagtaataccaaagtggacaaacgtgtcgagtccaaatatggcccgccctgtccaccttgtccagctccagaatttctgggaggacctgacgtattcctgtttcctccgaaacctaaggatacgctcatgatttctcgcactcccgaagtgacatgtgttgtggtcgacgtgagtgacgaagatccagaggttcagttcaactggtatgtcgatggggttgaggtccacaatgccaagactaagcctagagaggagcagtttaactccacataccgagtcgtgtcagtgctgaccgtcctgcatcaggactggctcaatgggaaggagtacaaatgcaaagtctccaataagggctacccaagtagcgaggaaaagaccatttcaaaagcgaaaggccaaccccgggaaccccaggtgtataccctgccaccaagccaagaggagatgaccaagaatcaggttagtctcacttgcctggtcaaaggattctatccctctgacatcgccgtcgaatgggagtccaatggccagcccgaaaacaactacaagaccacacctccagttctggacagcgacggtagtttcttcctgtactcacgcctgacagtggacaagagcagatggcaggaaggcaacgtattcagctgctccgtgatgcacgaagccctgcacaatcactacacacagaagagtttgagcctttcccctggtaga

SEQ ID NO: 167 - protein, 214 aa, Artificial Sequence; identical to SEQ ID NO: 91
  chimeric HM266-X4-P Light Chain PRT

SEQ ID NO: 168 - DNA, 642 bp, Artificial Sequence; identical to SEQ ID NO: 92
  chimeric HM266-X4-P Light Chain DNA

SEQ ID NO: 169 - protein, 447 aa, Artificial Sequence
  humanized HM242-C3-IgG1-K322A Heavy Chain PRT
QVQLVQSGPEVKKPGASVKVVCKASGYTFTSYYIQWVKQRPGQGLEWIGWIYPGDGTTKYNEKFKGRVTMTIDKSTRTAYMELRSLRSDDTAVYYCASYYGSYFDYWGQGTLVTVSSASTKGPSVFPLAPSSKSTSGGTAALGCLVKDYFPEPVTVSWNSGALTSGVHTFPAVLQSSGLYSLSSVVTVPSSSLGTQTYICNVNHKPSNTKVDKKVEPKSCDKTHTCPPCPAPELLGGPSVFLFPPKPKDTLMISRTPEVTCVVVDVSHEDPEVKFNWYVDGVEVHNAKTKPREEQYNSTYRVVSVLTVLHQDWLNGKEYKCAVSNKALPAPIEKTISKAKGQPREPQVYTLPPSRDELTKNQVSLTCLVKGFYPSDIAVEWESNGQPENNYKTTPPVLDSDGSFFLYSKLTVDKSRWQQGNVFSCSVMHEALHNHYTQKSLSLSPGK

SEQ ID NO: 170 - DNA, 1341 bp, Artificial Sequence
  humanized HM242-C3-IgG1-K322A Heavy Chain DNA
caggtgcagttggtccagagtggaccagaggtgaagaagcctggggccagtgtgaaggtggtctgcaaggcatcaggatacacgtttaccagctattacatccagtgggtgaagcaacgtcctggtcagggacttgaatggattgggtggatttaccccggtgatggcactactaagtacaatgagaagttcaaaggacgagtcaccatgaccatcgataagtcaactcgcacagcctatatggagctgagaagtctgcgctctgacgatacagctgtgtattactgcgcctcctactatgggtcctacttcgactattggggccagggcactctggtcaccgtgtctagtgcctccaccaaaggcccctctgtgtttccactggcaccaagctcaaagtcaaccagtggtggaaccgctgctctgggctgtctggttaaggactatttccccgaacctgtaaccgtaagctggaatagtggcgcactgacctccggggtccacacatttcccgccgtgctgcagagttcaggcctctattccctcagctccgtcgtgactgtcccctcctcttcccttggtactcagacttacatctgcaatgtgaaccataagccctccaacaccaaggtggacaagaaagtagagcctaagagttgtgacaaaacacacacctgtccaccatgtccagcacccgaattgctgggtggtccatccgtgtttctgttccctcctaagcccaaagatacactgatgatttctcggactccagaggttacgtgcgtggttgtggatgtcagccatgaagatcctgaggtcaaatttaactggtatgtggacggagtggaggtccacaatgccaaaacaaaacccagggaagagcagtacaactctacttatcgagttgtatccgtgctcacagtgctgcatcaggactggttgaatgggaaagagtacaagtgcgccgtatctaacaaagccttgcctgctcctatcgagaaaacaatcagcaaagccaagggacaacccagagaaccccaggtttacacccttccaccttccagggacgaactgaccaagaatcaggtgtctttgacatgcctggttaaaggcttctatccctctgacatagctgtagaatgggagagcaatggacagccagagaacaactacaagacgacacctcccgttctggatagcgatgggtcattctttctgtatagcaaactcaccgtggacaagtcacggtggcaacaaggcaacgtgttctcctgtagcgttatgcacgaagctcttcacaaccactacacccagaagtctctgagcctctctcccggcaag

SEQ ID NO: 171 - protein, 214 aa, Artificial Sequence
  humanized HM242-C3-IgG1-K322A Light Chain PRT
DIQMTQSPSSLSASVGDRVTITCRASQDISNYLNWYQQKPGKAPKLLIYYTSKLHSGVPSRFSGSGSGTDYTLTISSLQPEDFATYYCQQSSTLPFTFGQGTKLEIKRTVAAPSVFIFPPSDEQLKSGTASVVCLLNNFYPREAKVQWKVDNALQSGNSQESVTEQDSKDSTYSLSSTLTLSKADYEKHKVYACEVTHQGLSSPVTKSFNRGEC

SEQ ID NO: 172 - DNA, 642 bp, Artificial Sequence
  humanized HM242-C3-IgG1-K322A Light Chain DNA
gacattcagatgacccaaagccctagtagcctttccgcttcagttggcgatagggtcaccattacgtgtcgagctagccaggatatctcaaactacctgaattggtatcagcagaaacctggcaaagcccctaagctgctgatctactacactagtaagctgcatagcggagttccctctaggttctccggaagcggttcagggacagactataccctgaccattagctccttgcaaccagaggactttgctacctactattgccagcagtctagtactcttccctttacctttggccagggtactaagctggagatcaaacggacggttgcagcaccatccgtctttatcttcccaccttctgacgagcagctcaagtccggtactgcctccgtagtgtgtctcctgaacaacttctatcccagagaagccaaggtgcagtggaaagtggacaatgctctgcagtctgggaacagtcaagagtctgtgactgaacaggattccaaggatagcacctactccttgagttctacccttacactgtcaaaagccgactacgagaagcacaaggtgtatgcctgcgaagtcacacaccaagggttgtcatctcccgtgacaaagtccttcaatcgtggcgaatgc

SEQ ID NO: 173 - protein, 447 aa, Artificial Sequence
  humanized HM242-D3-IgG1-K322A Heavy Chain PRT
QVQLVQSGPEVKKPGASVKVVCKASGYTFTSYYIQWVRQVPGQGLEWMGWIYPGDGTTKYNEKFKGRVTMTIDTSTSTAYMELRSLRSDDTAVYYCASYYGSYFDYWGQGTLVTVSSASTKGPSVFPLAPSSKSTSGGTAALGCLVKDYFPEPVTVSWNSGALTSGVHTFPAVLQSSGLYSLSSVVTVPSSSLGTQTYICNVNHKPSNTKVDKKVEPKSCDKTHTCPPCPAPELLGGPSVFLFPPKPKDTLMISRTPEVTCVVVDVSHEDPEVKFNWYVDGVEVHNAKTKPREEQYNSTYRVVSVLTVLHQDWLNGKEYKCAVSNKALPAPIEKTISKAKGQPREPQVYTLPPSRDELTKNQVSLTCLVKGFYPSDIAVEWESNGQPENNYKTTPPVLDSDGSFFLYSKLTVDKSRWQQGNVFSCSVMHEALHNHYTQKSLSLSPGK

SEQ ID NO: 174 - DNA, 1341 bp, Artificial Sequence
  humanized HM242-D3-IgG1-K322A Heavy Chain DNA
caggtgcagctggttcagagcggtcccgaggtgaagaaaccaggtgcttccgtgaaggtagtttgcaaagccagtggctatactttcacctcctattacatccaatgggtgagacaggtgcctggccaaggtcttgagtggatggggtggatctatcccggcgatggtaccactaagtacaacgagaagttcaaagggagggttacgatgaccattgacacctcaactagcactgcttatatggaactgagatctctgcgatccgatgacacagcagtgtactactgcgcaagctactacggatcttactttgactattggggacaaggaactctggtcacagtgtctagtgcctcaaccaagggaccatccgtgttcccattggctcccagttccaaaagcaccagtggtggcaccgctgcccttggatgcctcgtaaaggactactttcctgagcccgtgacggtatcctggaactccggagcacttacatctggggtgcacacctttcctgccgtcctgcagtcatctggcctgtattctctgtcctctgtggtgacagtgcctagcagttctttgggaactcagacctacatctgcaatgtcaaccacaagccctctaatacgaaggtcgataagaaggtggaacccaaaagctgtgacaaaacccacacctgtcctccatgtcccgctcctgaactgctgggtggaccctctgtgtttctgttcccacccaaacctaaagataccctgatgattagtaggacaccagaggtgacatgtgtcgtagtcgatgtgtcccatgaggaccctgaagtcaagttcaattggtacgttgatggcgttgaggttcacaatgccaagaccaagccccgggaagagcagtataactcaacctatcgggtcgtcagcgtgctcactgtgctgcatcaggactggttgaacgggaaggagtataagtgtgcagtcagtaacaaagccctgcctgctcccatcgaaaagactatcagcaaggccaaggggcagccccgagaacctcaggtgtatactctcccaccttctcgtgatgaactgaccaagaatcaggtatcactgacatgccttgtgaaaggcttttatccctccgacatagctgtcgagtgggagagcaatgggcagccagagaataactacaagacaacaccacccgtcctcgatagcgacggctccttctttctgtactccaagctcacagttgacaaaagccgctggcaacagggcaacgtgtttagctgcagtgtaatgcatgaagccctgcacaaccactacacacagaaatccctctccttgtcaccaggcaaa

SEQ ID NO: 175 - protein, 214 aa, Artificial Sequence; identical to SEQ ID NO: 171
  humanized HM242-D3-IgG1-K322A Light Chain PRT

SEQ ID NO: 176 - DNA, 642 bp, Artificial Sequence; identical to SEQ ID NO: 172
  humanized HM242-D3-IgG1-K322A Light Chain DNA

SEQ ID NO: 177 - protein, 447 aa, Artificial Sequence
  humanized HM268-K8-IgG1-K322A Heavy Chain PRT
QVQLVQSGPEVKKPGASVKVVCKTSGYTFTSYYIQWLKQRPGQGLEWIGWIYFGDASTKYNEKFKGRVTMTADKSTSTAYMELRSLRSDDTAVYYCASYYGSYFDYWGQGTTVTVSSASTKGPSVFPLAPSSKSTSGGTAALGCLVKDYFPEPVTVSWNSGALTSGVHTFPAVLQSSGLYSLSSVVTVPSSSLGTQTYICNVNHKPSNTKVDKKVEPKSCDKTHTCPPCPAPELLGGPSVFLFPPKPKDTLMISRTPEVTCVVVDVSHEDPEVKFNWYVDGVEVHNAKTKPREEQYNSTYRVVSVLTVLHQDWLNGKEYKCAVSNKALPAPIEKTISKAKGQPREPQVYTLPPSRDELTKNQVSLTCLVKGFYPSDIAVEWESNGQPENNYKTTPPVLDSDGSFFLYSKLTVDKSRWQQGNVFSCSVMHEALHNHYTQKSLSLSPGK

SEQ ID NO: 178 - DNA, 1341 bp, Artificial Sequence
  humanized HM268-K8-IgG1-K322A Heavy Chain DNA
caggtgcagctggttcagtccgggcctgaggtgaagaagcccggcgctagtgtgaaggtcgtctgcaaaacttcaggctataccttcacatcctattacatccagtggctgaagcaacgccctggacaagggctcgaatggatcgggtggatctactttggggacgcttctaccaagtacaacgagaagtttaagggacgagtgacaatgaccgccgacaagtccacaagcaccgcctacatggagctcagatccctcaggagcgatgataccgcagtctactattgcgcctcttattacgggtcctacttcgactattggggtcagggaacaacggttacagtctcttccgcctctactaaaggcccttctgtgtttcctctggctccatcctctaagtcaaccagcggcggtactgctgctcttggctgtctggtgaaagactacttccccgaaccagtgaccgtgagttggaacagtggcgcattgacaagcggagtacacacctttccagcagtgttgcagtccagcggcctgtatagcctttcctctgtggtgactgtgccctcaagtagcctgggaacgcagacatacatctgtaacgtcaatcataagccctccaataccaaggtcgataagaaggtggaacccaagtcttgcgacaaaacccatacttgtcctccctgtccagcacccgaactgctgggtggaccctccgtatttctctttccacccaaacccaaagacaccctgatgatttcccgcactcctgaggttacatgcgttgtggttgatgtgtctcatgaagatccagaggtgaagttcaactggtatgtggacggagtagaggttcacaatgctaagactaaaccccgtgaggagcaatataattccacctatcgggtggttagcgtgctgacagtcctgcatcaggattggctgaatgggaaggagtacaaatgcgccgtaagcaacaaagccttgcctgccccaatagagaaaactatcagcaaggccaagggtcagcccagagaacctcaagtctatactctgcctccatcacgggatgaacttaccaagaatcaggtgtctctgacctgtctggtcaagggcttctatccatctgacattgccgtagagtgggaaagtaatggtcagcccgaaaacaactacaaaacaactcctccagtcttggatagtgacggaagcttcttcctttactccaagctgacagtggacaaatcacgatggcagcagggcaacgtattcagttgcagcgtcatgcacgaggctctccacaaccactacacccagaaaagtctgtctttgtcacctggcaaa

SEQ ID NO: 179 - protein, 214 aa, Artificial Sequence
  humanized HM268-K8-IgG1-K322A Light Chain PRT
DIQMTQSPSSLSASVGDRVTITCRASQDISNYLNWYQQKPDGTVKLLIYSTSRLHSGVPSRFSGSGSGTDYTLTISSLQPEDFATYYCQQGSTLPFTFGQGTKLEIKRTVAAPSVFIFPPSDEQLKSGTASVVCLLNNFYPREAKVQWKVDNALQSGNSQESVTEQDSKDSTYSLSSTLTLSKADYEKHKVYACEVTHQGLSSPVTKSFNRGEC

SEQ ID NO: 180 - DNA, 642 bp, Artificial Sequence
  humanized HM268-K8-IgG1-K322A Light Chain DNA
gacattcagatgacccaatctccatcttccctgtctgcttcagtcggagatcgggtcactatcacctgtagagccagtcaggacataagcaactacctgaactggtatcagcagaaacccgatggtaccgtgaaactcctgatctatagcactagcaggctgcattccggtgttccatccaggttttctggctccggttcaggcacagactacacgctcactatcagttcactgcaacctgaggatttcgccacatactactgccagcaaggctcaacactgccctttacctttgggcaaggcaccaagttggagattaagcggacagtggctgcacctagtgtgttcatctttcctcccagcgatgagcagctgaaatccgggacagcttctgtggtgtgcttgctgaacaacttctatccacgagaagctaaggtccagtggaaggtagacaatgcccttcagtccggcaattcccaggagagtgttaccgaacaggacagcaaggactctacttacagcctgtctagcacgcttaccctgtccaaagccgattacgagaagcacaaagtgtatgcctgtgaagtgacacatcaggggcttagttcacccgtaaccaagagcttcaatcgtggagaatgc

SEQ ID NO: 181 - protein, 446 aa, Artificial Sequence
  humanized HM297-H5-IgG1-K322A Heavy Chain PRT
QVQLVQSGPEVKKPGASVKIPCKASGYTFTDYNVDWVRQVPGQGLEWMGDIDPNNGGTIYNQKFKDRVTMTVDKSTRTAYMELRSLRSDDTAVYYCARWRGAMDYWGQGTLVTVSSASTKGPSVFPLAPSSKSTSGGTAALGCLVKDYFPEPVTVSWNSGALTSGVHTFPAVLQSSGLYSLSSVVTVPSSSLGTQTYICNVNHKPSNTKVDKKVEPKSCDKTHTCPPCPAPELLGGPSVFLFPPKPKDTLMISRTPEVTCVVVDVSHEDPEVKFNWYVDGVEVHNAKTKPREEQYNSTYRVVSVLTVLHQDWLNGKEYKCAVSNKALPAPIEKTISKAKGQPREPQVYTLPPSRDELTKNQVSLTCLVKGFYPSDIAVEWESNGQPENNYKTTPPVLDSDGSFFLYSKLTVDKSRWQQGNVFSCSVMHEALHNHYTQKSLSLSPGK

SEQ ID NO: 182 - DNA, 1338 bp, Artificial Sequence
  humanized HM297-H5-IgG1-K322A Heavy Chain DNA
caggttcagctggtccaatccgggcccgaggttaagaagcccggagctagcgtcaagataccctgcaaagctagtggctataccttcacagactacaatgtagactgggttcggcaagtacccggtcagggcttggagtggatgggagatatcgaccccaataatggagggactatctacaaccagaaattcaaggatcgtgtcacaatgacggtggacaagagtacaaggaccgcctacatggagctgcgaagcttgcgctctgacgatacagccgtctactactgtgctaggtggagaggtgccatggactattggggccagggcaccctggtaaccgtgtcatctgcctctaccaaaggtcccagcgtgtttcctctcgccccatcaagcaagagcacatcaggtgggactgctgcactggggtgtttggtcaaggattacttccctgagccagtgacggtatcatggaactccggagcccttaccagcggagtgcatacttttcccgctgtgctgcaatcctccggcttgtatagcctttcttctgtggtcactgtgccttcttcctcactgggcacccagacctacatttgcaacgtcaaccacaagccatcaaataccaaagtcgacaagaaagtggaaccaaaatcttgcgacaaaacacacacttgccctccctgtcccgcacccgaactgctgggaggccctagcgtatttctctttccaccaaagcccaaggatactctgatgatcagccgaactcctgaggttacttgcgtcgtggtggatgtgagtcacgaggatccagaggtgaagttcaactggtatgtggatggtgtcgaagtacacaatgccaagaccaaacccagagaggaacagtataactccacctatcgggtggtgtctgttcttaccgttctgcatcaggattggctcaatggaaaggagtacaagtgtgcagtgtccaacaaggcactgcctgctcctatcgaaaagacgatcagtaaagccaaaggccagccacgggaaccacaggtgtacacactgcctccatctagggatgagctgactaagaaccaggttagcctgacctgtctggtcaaggggttctatccttcagacattgccgtggaatgggaaagcaatggtcagcccgagaacaactacaagacaaccccacccgtcctggattccgacggctccttctttctgtactccaaactgacagtggacaaaagtagatggcaacaggggaatgtgtttagttgctctgtgatgcatgaggcccttcacaatcactatacacagaaatccctctccttgtcccctggaaag

SEQ ID NO: 183 - protein, 214 aa, Artificial Sequence
  humanized HM297-H5-IgG1-K322A Light Chain PRT
DIQMTQSPSSLSASVGDRVTITCRASQDIDNYLKWYQQKPDGTVKLLIYDTSRLHSGVPSRFSGSGSGTDYTLTISSLKQEDFATYYCQQGYTLPWTFGQGTKLEIKRTVAAPSVFIFPPSDEQLKSGTASVVCLLNNFYPREAKVQWKVDNALQSGNSQESVTEQDSKDSTYSLSSTLTLSKADYEKHKVYACEVTHQGLSSPVTKSFNRGEC

SEQ ID NO: 184 - DNA, 642 bp, Artificial Sequence
  humanized HM297-H5-IgG1-K322A Light Chain DNA
gacatccagatgacccagtcaccatcctctctgtccgcaagtgtgggtgatagggtgacgattacctgtcgtgcctcacaagacatcgacaactacctcaagtggtaccagcagaaacccgatggaaccgttaaactgctgatctacgatacctcacgccttcattctggcgtaccaagccggttttctggctctggcagtggcactgactacacacttaccatttcctccttgaaacaggaggattttgccacctactattgccagcaagggtacacactgccttggacttttgggcaaggaacgaagttggagataaagcggactgttgctgctcctagcgtgttcatcttcccacccagtgacgaacagctcaagagcggtactgctagcgtggtctgcttgctgaacaacttctatcccagagaggctaaagtgcagtggaaggtcgataatgccctccagtctgggaatagccaggaatccgtgactgaacaggactccaaggacagtacctatagcctgtctagcacactgacactgtcaaaagccgattatgagaagcacaaggtctatgcctgtgaggtaacacaccaaggcctttcctctcctgtgacaaagagtttcaatcgaggagaatgc

SEQ ID NO: 185 - protein, 447 aa, Artificial Sequence
  humanized HM242-C3-X2-K Heavy Chain PRT
QVQLVQSGPEVKKPGASVKVVCKASGYTFTSYYIQWVKQRPGQGLEWIGWIYPGDGTTKYNEKFKGRVTMTIDKSTRTAYMELRSLRSDDTAVYYCASYYGSYFDYWGQGTLVTVSSASTKGPSVFPLAPSSKSTSGGTAALGCLVKDYFPEPVTVSWNSGALTSGVHTFPAVLQSSGLYSLSSVVTVPSSSLGTQTYICNVNHKPSNTKVDKKVEPKSCDKTHTCPPCPAPELLDGPSVFLFPPKPKDTLMISRTPEVTCVVVDVSDEDPEVKFNWYVDGVEVHNAKTKPREEQYNSTYRVVSVLTVLHQDWLNGKEYKCAVSNKALPAPIEKTISKAKGQPREPQVYTLPPSRDELTKNQVSLTCLVKGFYPSDIAVEWESNGQPENNYKTTPPVLDSDGSFFLYSKLTVDKSRWQQGNVFSCSVMHEALHNHYTQKSLSLSPGK

SEQ ID NO: 186 - DNA, 1341 bp, Artificial Sequence
  humanized HM242-C3-X2-K Heavy Chain DNA
caggtgcagttggtccagagtggaccagaggtgaagaagcctggggccagtgtgaaggtggtctgcaaggcatcaggatacacgtttaccagctattacatccagtgggtgaagcaacgtcctggtcagggacttgaatggattgggtggatttaccccggtgatggcactactaagtacaatgagaagttcaaaggacgagtcaccatgaccatcgataagtcaactcgcacagcctatatggagctgagaagtctgcgctctgacgatacagctgtgtattactgcgcctcctactatgggtcctacttcgactattggggccagggcactctggtcaccgtgtctagtgcctccaccaaaggcccctctgtgtttccactggcaccaagctcaaagtcaaccagtggtggaaccgctgctctgggctgtctggttaaggactatttccccgaacctgtaaccgtaagctggaatagtggcgcactgacctccggggtccacacatttcccgccgtgctgcagagttcaggcctctattccctcagctccgtcgtgactgtcccctcctcttcccttggtactcagacttacatctgcaacgtgaaccacaagccctccaacaccaaggtggacaagaaggtcgagcccaagtcctgcgacaagacccacacctgccccccctgccccgcccccgagctgctggacggcccctccgtgttcctgttcccccccaagcccaaggacaccctgatgatctccaggacccccgaggtgacctgcgtggtggtggacgtgtccgacgaggaccccgaggtgaagttcaactggtacgtggacggcgtggaggtgcacaacgccaagaccaagcccagggaggagcagtacaactccacctacagggtggtgtccgtgctgaccgtgctgcaccaggactggctgaacggcaaggagtacaagtgcgccgtgtccaacaaggccctgcccgcccccatcgagaagaccatctccaaggccaagggccagcccagggagccccaggtgtacaccctgcccccctccagggacgagctgaccaagaaccaggtgtccctgacctgcctggtgaagggcttctacccctccgacatcgccgtggagtgggagtccaacggccagcccgagaacaactacaagaccaccccccccgtgctggactccgacggctccttcttcctgtactccaagctgaccgtggacaagtccaggtggcagcagggcaacgtgttctcctgctccgtgatgcacgaggccctgcacaaccactacacccagaagtccctgtccctgtcccccggcaag

SEQ ID NO: 187 - protein, 214 aa, Artificial Sequence; identical to SEQ ID NO: 171
  humanized HM242-C3-X2-K Light Chain PRT

SEQ ID NO: 188 - DNA, 642 bp, Artificial Sequence; identical to SEQ ID NO: 172
  humanized HM242-C3-X2-K Light Chain DNA

SEQ ID NO: 189 - protein, 447 aa, Artificial Sequence
  humanized HM242-C3-X3-K Heavy Chain PRT
QVQLVQSGPEVKKPGASVKVVCKASGYTFTSYYIQWVKQRPGQGLEWIGWIYPGDGTTKYNEKFKGRVTMTIDKSTRTAYMELRSLRSDDTAVYYCASYYGSYFDYWGQGTLVTVSSASTKGPSVFPLAPSSKSTSGGTAALGCLVKDYFPEPVTVSWNSGALTSGVHTFPAVLQSSGLYSLSSVVTVPSSSLGTQTYICNVNHKPSNTKVDKKVEPKSCDKTHTCPPCPAPELLGGPDVFLFPPKPKDTLMISRTPEVTCVVVDVSDEDPEVKFNWYVDGVEVHNAKTKPREEQYNSTYRVVSVLTVLHQDWLNGKEYKCAVSNKALPAPIEKTISKAKGQPREPQVYTLPPSRDELTKNQVSLTCLVKGFYPSDIAVEWESNGQPENNYKTTPPVLDSDGSFFLYSKLTVDKSRWQQGNVFSCSVMHEALHNHYTQKSLSLSPGK

SEQ ID NO: 190 - DNA, 1341 bp, Artificial Sequence
  humanized HM242-C3-X3-K Heavy Chain DNA
caggtgcagttggtccagagtggaccagaggtgaagaagcctggggccagtgtgaaggtggtctgcaaggcatcaggatacacgtttaccagctattacatccagtgggtgaagcaacgtcctggtcagggacttgaatggattgggtggatttaccccggtgatggcactactaagtacaatgagaagttcaaaggacgagtcaccatgaccatcgataagtcaactcgcacagcctatatggagctgagaagtctgcgctctgacgatacagctgtgtattactgcgcctcctactatgggtcctacttcgactattggggccagggcactctggtcaccgtgtctagtgcctccaccaaaggcccctctgtgtttccactggcaccaagctcaaagtcaaccagtggtggaaccgctgctctgggctgtctggttaaggactatttccccgaacctgtaaccgtaagctggaatagtggcgcactgacctccggggtccacacatttcccgccgtgctgcagagttcaggcctctattccctcagctccgtcgtgactgtcccctcctcttcccttggtactcagacttacatctgcaacgtgaaccacaagccctccaacaccaaggtggacaagaaggtcgagcccaagtcctgcgacaagacccacacctgccccccctgccccgcccccgagctgctgggcggccccgacgtgttcctgttcccccccaagcccaaggacaccctgatgatctccaggacccccgaggtgacctgcgtggtggtggacgtgagtgacgaggaccccgaggtgaagttcaactggtacgtggacggcgtggaggtgcacaacgccaagaccaagcccagggaggagcagtacaactccacctacagggtggtgtccgtgctgaccgtgctgcaccaggactggctgaacggcaaggagtacaagtgcgccgtgtccaacaaggccctgcccgcccccatcgagaagaccatctccaaggccaagggccagcccagggagccccaggtgtacaccctgcccccctccagggacgagctgaccaagaaccaggtgtccctgacctgcctggtgaagggcttctacccctccgacatcgccgtggagtgggagtccaacggccagcccgagaacaactacaagaccaccccccccgtgctggactccgacggctccttcttcctgtactccaagctgaccgtggacaagtccaggtggcagcagggcaacgtgttctcctgctccgtgatgcacgaggccctgcacaaccactacacccagaagtccctgtccctgtcccccggcaag

SEQ ID NO: 191 - protein, 214 aa, Artificial Sequence; identical to SEQ ID NO: 171
  humanized HM242-C3-X3-K Light Chain PRT

SEQ ID NO: 192 - DNA, 642 bp, Artificial Sequence; identical to SEQ ID NO: 172
  humanized HM242-C3-X3-K Light Chain DNA

SEQ ID NO: 193 - protein, 447 aa, Artificial Sequence
  humanized HM242-C3-X3-KE Heavy Chain PRT
QVQLVQSGPEVKKPGASVKVVCKASGYTFTSYYIQWVKQRPGQGLEWIGWIYPGDGTTKYNEKFKGRVTMTIDKSTRTAYMELRSLRSDDTAVYYCASYYGSYFDYWGQGTLVTVSSASTKGPSVFPLAPSSKSTSGGTAALGCLVKDYFPEPVTVSWNSGALTSGVHTFPAVLQSSGLYSLSSVVTVPSSSLGTQTYICNVNHKPSNTKVDKKVEPKSCDKTHTCPPCPAPELLGGPDVFLFPPKPKDTLMISRTPEVTCVVVDVSDEDPEVKFNWYVDGVEVHNAKTKPRAEQYNSTYRVVSVLTVLHQDWLNGKEYKCAVSNKALPAPIEKTISKAKGQPREPQVYTLPPSRDELTKNQVSLTCLVKGFYPSDIAVEWESNGQPENNYKTTPPVLDSDGSFFLYSKLTVDKSRWQQGNVFSCSVMHEALHNHYTQKSLSLSPGK

SEQ ID NO: 194 - DNA, 1341 bp, Artificial Sequence
  humanized HM242-C3-X3-KE Heavy Chain DNA
caggtgcagttggtccagagtggaccagaggtgaagaagcctggggccagtgtgaaggtggtctgcaaggcatcaggatacacgtttaccagctattacatccagtgggtgaagcaacgtcctggtcagggacttgaatggattgggtggatttaccccggtgatggcactactaagtacaatgagaagttcaaaggacgagtcaccatgaccatcgataagtcaactcgcacagcctatatggagctgagaagtctgcgctctgacgatacagctgtgtattactgcgcctcctactatgggtcctacttcgactattggggccagggcactctggtcaccgtgtctagtgcctccaccaaaggcccctctgtgtttccactggcaccaagctcaaagtcaaccagtggtggaaccgctgctctgggctgtctggttaaggactatttccccgaacctgtaaccgtaagctggaatagtggcgcactgacctccggggtccacacatttcccgccgtgctgcagagttcaggcctctattccctcagctccgtcgtgactgtcccctcctcttcccttggtactcagacttacatctgcaacgtgaaccacaagccctccaacaccaaggtggacaagaaggtcgagcccaagtcctgcgacaagacccacacctgccccccctgccccgcccccgagctgctgggcggccccgacgtgttcctgttcccccccaagcccaaggacaccctgatgatctccaggacccccgaggtgacctgcgtggtggtggacgtgagtgacgaggaccccgaggtgaagttcaactggtacgtggacggcgtggaggtgcacaacgccaagaccaagcccagggccgagcagtacaactccacctacagggtggtgtccgtgctgaccgtgctgcaccaggactggctgaacggcaaggagtacaagtgcgccgtgtccaacaaggccctgcccgcccccatcgagaagaccatctccaaggccaagggccagcccagggagccccaggtgtacaccctgcccccctccagggacgagctgaccaagaaccaggtgtccctgacctgcctggtgaagggcttctacccctccgacatcgccgtggagtgggagtccaacggccagcccgagaacaactacaagaccaccccccccgtgctggactccgacggctccttcttcctgtactccaagctgaccgtggacaagtccaggtggcagcagggcaacgtgttctcctgctccgtgatgcacgaggccctgcacaaccactacacccagaagtccctgtccctgtcccccggcaag

SEQ ID NO: 195 - protein, 214 aa, Artificial Sequence; identical to SEQ ID NO: 171
  humanized HM242-C3-X3-KE Light Chain PRT

SEQ ID NO: 196 - DNA, 642 bp, Artificial Sequence; identical to SEQ ID NO: 172
  humanized HM242-C3-X3-KE Light Chain DNA

SEQ ID NO: 197 - protein, 447 aa, Artificial Sequence
  humanized HM242-C3-X3-KI Heavy Chain PRT
QVQLVQSGPEVKKPGASVKVVCKASGYTFTSYYIQWVKQRPGQGLEWIGWIYPGDGTTKYNEKFKGRVTMTIDKSTRTAYMELRSLRSDDTAVYYCASYYGSYFDYWGQGTLVTVSSASTKGPSVFPLAPSSKSTSGGTAALGCLVKDYFPEPVTVSWNSGALTSGVHTFPAVLQSSGLYSLSSVVTVPSSSLGTQTYICNVNHKPSNTKVDKKVEPKSCDKTHTCPPCPAPELLGGPDVFLFPPKPKDTLMISRTPEVTCVVVDVSDEDPEVKFNWYVDGVEVHNAKTKPREEQYNSTYRVVSVLTVLHQDWLNGKEYKCAVSNKALPAPEEKTISKAKGQPREPQVYTLPPSRDELTKNQVSLTCLVKGFYPSDIAVEWESNGQPENNYKTTPPVLDSDGSFFLYSKLTVDKSRWQQGNVFSCSVMHEALHNHYTQKSLSLSPGK

SEQ ID NO: 198 - DNA, 1341 bp, Artificial Sequence
  humanized HM242-C3-X3-KI Heavy Chain DNA
caggtgcagttggtccagagtggaccagaggtgaagaagcctggggccagtgtgaaggtggtctgcaaggcatcaggatacacgtttaccagctattacatccagtgggtgaagcaacgtcctggtcagggacttgaatggattgggtggatttaccccggtgatggcactactaagtacaatgagaagttcaaaggacgagtcaccatgaccatcgataagtcaactcgcacagcctatatggagctgagaagtctgcgctctgacgatacagctgtgtattactgcgcctcctactatgggtcctacttcgactattggggccagggcactctggtcaccgtgtctagtgcctccaccaaaggcccctctgtgtttccactggcaccaagctcaaagtcaaccagtggtggaaccgctgctctgggctgtctggttaaggactatttccccgaacctgtaaccgtaagctggaatagtggcgcactgacctccggggtccacacatttcccgccgtgctgcagagttcaggcctctattccctcagctccgtcgtgactgtcccctcctcttcccttggtactcagacttacatctgcaacgtgaaccacaagccctccaacaccaaggtggacaagaaggtcgagcccaagtcctgcgacaagacccacacctgccccccctgccccgcccccgagctgctgggcggccccgacgtgttcctgttcccccccaagcccaaggacaccctgatgatctccaggacccccgaggtgacctgcgtggtggtggacgtgtccgacgaggaccccgaggtgaagttcaactggtacgtggacggcgtggaggtgcacaacgccaagaccaagcccagggaggagcagtacaactccacctacagggtggtgtccgtgctgaccgtgctgcaccaggactggctgaacggcaaggagtacaagtgcgccgtgtccaacaaggccctgcccgcccccgaggagaagaccatctccaaggccaagggccagcccagggagccccaggtgtacaccctgcccccctccagggacgagctgaccaagaaccaggtgtccctgacctgcctggtgaagggcttctacccctccgacatcgccgtggagtgggagtccaacggccagcccgagaacaactacaagaccaccccccccgtgctggactccgacggctccttcttcctgtactccaagctgaccgtggacaagtccaggtggcagcagggcaacgtgttctcctgctccgtgatgcacgaggccctgcacaaccactacacccagaagtccctgtccctgtcccccggcaag

SEQ ID NO: 199 - protein, 214 aa, Artificial Sequence; identical to SEQ ID NO: 171
  humanized HM242-C3-X3-KI Light Chain PRT

SEQ ID NO: 200 - DNA, 642 bp, Artificial Sequence; identical to SEQ ID NO: 172
  humanized HM242-C3-X3-KI Light Chain DNA

SEQ ID NO: 201 - protein, 447 aa, Artificial Sequence
  humanized HM242-C3-X3-KL Heavy Chain PRT
QVQLVQSGPEVKKPGASVKVVCKASGYTFTSYYIQWVKQRPGQGLEWIGWIYPGDGTTKYNEKFKGRVTMTIDKSTRTAYMELRSLRSDDTAVYYCASYYGSYFDYWGQGTLVTVSSASTKGPSVFPLAPSSKSTSGGTAALGCLVKDYFPEPVTVSWNSGALTSGVHTFPAVLQSSGLYSLSSVVTVPSSSLGTQTYICNVNHKPSNTKVDKKVEPKSCDKTHTCPPCPAPELLGGPDVFLFPPKPKDTLMISRTPEVTCVVVDVSDEDPEVKFNWYVDGVEVHNAKTKPREEQYNSTYRVVSVLTVLHQDWLNGKEYKCAVSNKAYPAPIEKTISKAKGQPREPQVYTLPPSRDELTKNQVSLTCLVKGFYPSDIAVEWESNGQPENNYKTTPPVLDSDGSFFLYSKLTVDKSRWQQGNVFSCSVMHEALHNHYTQKSLSLSPGK

SEQ ID NO: 202 - DNA, 1341 bp, Artificial Sequence
  humanized HM242-C3-X3-KL Heavy Chain DNA
caggtgcagttggtccagagtggaccagaggtgaagaagcctggggccagtgtgaaggtggtctgcaaggcatcaggatacacgtttaccagctattacatccagtgggtgaagcaacgtcctggtcagggacttgaatggattgggtggatttaccccggtgatggcactactaagtacaatgagaagttcaaaggacgagtcaccatgaccatcgataagtcaactcgcacagcctatatggagctgagaagtctgcgctctgacgatacagctgtgtattactgcgcctcctactatgggtcctacttcgactattggggccagggcactctggtcaccgtgtctagtgcctccaccaaaggcccctctgtgtttccactggcaccaagctcaaagtcaaccagtggtggaaccgctgctctgggctgtctggttaaggactatttccccgaacctgtaaccgtaagctggaatagtggcgcactgacctccggggtccacacatttcccgccgtgctgcagagttcaggcctctattccctcagctccgtcgtgactgtcccctcctcttcccttggtactcagacttacatctgcaacgtgaaccacaagccctccaacaccaaggtggacaagaaggtcgagcccaagtcctgcgacaagacccacacctgccccccctgccccgcccccgagctgctgggcggccccgacgtgttcctgttcccccccaagcccaaggacaccctgatgatctccaggacccccgaggtgacctgcgtggtggtggacgtgtccgacgaggaccccgaggtgaagttcaactggtacgtggacggcgtggaggtgcacaacgccaagaccaagcccagggaggagcagtacaactccacctacagggtggtgtccgtgctgaccgtgctgcaccaggactggctgaacggcaaggagtacaagtgcgccgtgtccaacaaggcctaccccgcccccatcgagaagaccatctccaaggccaagggccagcccagggagccccaggtgtacaccctgcccccctccagggacgagctgaccaagaaccaggtgtccctgacctgcctggtgaagggcttctacccctccgacatcgccgtggagtgggagtccaacggccagcccgagaacaactacaagaccaccccccccgtgctggactccgacggctccttcttcctgtactccaagctgaccgtggacaagtccaggtggcagcagggcaacgtgttctcctgctccgtgatgcacgaggccctgcacaaccactacacccagaagtccctgtccctgtcccccggcaag

SEQ ID NO: 203 - protein, 214 aa, Artificial Sequence; identical to SEQ ID NO: 171
  humanized HM242-C3-X3-KL Light Chain PRT

SEQ ID NO: 204 - DNA, 642 bp, Artificial Sequence; identical to SEQ ID NO: 172
  humanized HM242-C3-X3-KL Light Chain DNA

SEQ ID NO: 205 - protein, 447 aa, Artificial Sequence
  humanized HM242-C3-X3-KS Heavy Chain PRT
QVQLVQSGPEVKKPGASVKVVCKASGYTFTSYYIQWVKQRPGQGLEWIGWIYPGDGTTKYNEKFKGRVTMTIDKSTRTAYMELRSLRSDDTAVYYCASYYGSYFDYWGQGTLVTVSSASTKGPSVFPLAPSSKSTSGGTAALGCLVKDYFPEPVTVSWNSGALTSGVHTFPAVLQSSGLYSLSSVVTVPSSSLGTQTYICNVNHKPSNTKVDKKVEPKSCDKTHTCPPCPAPELLGGPDVFLFPPKPKDTLMISRTPEVTCVVVDVGDEDPEVKFNWYVDGVEVHNAKTKPREEQYNSTYRVVSVLTVLHQDWLNGKEYKCAVSNKALPAPIEKTISKAKGQPREPQVYTLPPSRDELTKNQVSLTCLVKGFYPSDIAVEWESNGQPENNYKTTPPVLDSDGSFFLYSKLTVDKSRWQQGNVFSCSVMHEALHNHYTQKSLSLSPGK

SEQ ID NO: 206 - DNA, 1341 bp, Artificial Sequence
  humanized HM242-C3-X3-KS Heavy Chain DNA
caggtgcagttggtccagagtggaccagaggtgaagaagcctggggccagtgtgaaggtggtctgcaaggcatcaggatacacgtttaccagctattacatccagtgggtgaagcaacgtcctggtcagggacttgaatggattgggtggatttaccccggtgatggcactactaagtacaatgagaagttcaaaggacgagtcaccatgaccatcgataagtcaactcgcacagcctatatggagctgagaagtctgcgctctgacgatacagctgtgtattactgcgcctcctactatgggtcctacttcgactattggggccagggcactctggtcaccgtgtctagtgcctccaccaaaggcccctctgtgtttccactggcaccaagctcaaagtcaaccagtggtggaaccgctgctctgggctgtctggttaaggactatttccccgaacctgtaaccgtaagctggaatagtggcgcactgacctccggggtccacacatttcccgccgtgctgcagagttcaggcctctattccctcagctccgtcgtgactgtcccctcctcttcccttggtactcagacttacatctgcaacgtgaaccacaagccctccaacaccaaggtggacaagaaggtcgagcccaagtcctgcgacaagacccacacctgccccccctgccccgcccccgagctgctgggcggccccgacgtgttcctgttcccccccaagcccaaggacaccctgatgatctccaggacccccgaggtgacctgcgtggtggtggacgtgggcgacgaggaccccgaggtgaagttcaactggtacgtggacggcgtggaggtgcacaacgccaagaccaagcccagggaggagcagtacaactccacctacagggtggtgtccgtgctgaccgtgctgcaccaggactggctgaacggcaaggagtacaagtgcgccgtgtccaacaaggccctgcccgcccccatcgagaagaccatctccaaggccaagggccagcccagggagccccaggtgtacaccctgcccccctccagggacgagctgaccaagaaccaggtgtccctgacctgcctggtgaagggcttctacccctccgacatcgccgtggagtgggagtccaacggccagcccgagaacaactacaagaccaccccccccgtgctggactccgacggctccttcttcctgtactccaagctgaccgtggacaagtccaggtggcagcagggcaacgtgttctcctgctccgtgatgcacgaggccctgcacaaccactacacccagaagtccctgtccctgtcccccggcaag

SEQ ID NO: 207 - protein, 214 aa, Artificial Sequence; identical to SEQ ID NO: 171
  humanized HM242-C3-X3-KS Light Chain PRT

SEQ ID NO: 208 - DNA, 642 bp, Artificial Sequence; identical to SEQ ID NO: 172
  humanized HM242-C3-X3-KS Light Chain DNA

SEQ ID NO: 209 - protein, 447 aa, Artificial Sequence
  humanized HM242-C3-X3-KSI Heavy Chain PRT
QVQLVQSGPEVKKPGASVKVVCKASGYTFTSYYIQWVKQRPGQGLEWIGWIYPGDGTTKYNEKFKGRVTMTIDKSTRTAYMELRSLRSDDTAVYYCASYYGSYFDYWGQGTLVTVSSASTKGPSVFPLAPSSKSTSGGTAALGCLVKDYFPEPVTVSWNSGALTSGVHTFPAVLQSSGLYSLSSVVTVPSSSLGTQTYICNVNHKPSNTKVDKKVEPKSCDKTHTCPPCPAPELLGGPDVFLFPPKPKDTLMISRTPEVTCVVVDVGDEDPEVKFNWYVDGVEVHNAKTKPREEQYNSTYRVVSVLTVLHQDWLNGKEYKCAVSNKALPAPEEKTISKAKGQPREPQVYTLPPSRDELTKNQVSLTCLVKGFYPSDIAVEWESNGQPENNYKTTPPVLDSDGSFFLYSKLTVDKSRWQQGNVFSCSVMHEALHNHYTQKSLSLSPGK

SEQ ID NO: 210 - DNA, 1341 bp, Artificial Sequence
  humanized HM242-C3-X3-KSI Heavy Chain DNA
caggtgcagttggtccagagtggaccagaggtgaagaagcctggggccagtgtgaaggtggtctgcaaggcatcaggatacacgtttaccagctattacatccagtgggtgaagcaacgtcctggtcagggacttgaatggattgggtggatttaccccggtgatggcactactaagtacaatgagaagttcaaaggacgagtcaccatgaccatcgataagtcaactcgcacagcctatatggagctgagaagtctgcgctctgacgatacagctgtgtattactgcgcctcctactatgggtcctacttcgactattggggccagggcactctggtcaccgtgtctagtgcctccaccaaaggcccctctgtgtttccactggcaccaagctcaaagtcaaccagtggtggaaccgctgctctgggctgtctggttaaggactatttccccgaacctgtaaccgtaagctggaatagtggcgcactgacctccggggtccacacatttcccgccgtgctgcagagttcaggcctctattccctcagctccgtcgtgactgtcccctcctcttcccttggtactcagacttacatctgcaacgtgaaccacaagccctccaacaccaaggtggacaagaaggtcgagcccaagtcctgcgacaagacccacacctgccccccctgccccgcccccgagctgctgggcggccccgacgtgttcctgttcccccccaagcccaaggacaccctgatgatctccaggacccccgaggtgacctgcgtggtggtggacgtgggcgacgaggaccccgaggtgaagttcaactggtacgtggacggcgtggaggtgcacaacgccaagaccaagcccagggaggagcagtacaactccacctacagggtggtgtccgtgctgaccgtgctgcaccaggactggctgaacggcaaggagtacaagtgcgccgtgtccaacaaggccctgcccgcccccgaggagaagaccatctccaaggccaagggccagcccagggagccccaggtgtacaccctgcccccctccagggacgagctgaccaagaaccaggtgtccctgacctgcctggtgaagggcttctacccctccgacatcgccgtggagtgggagtccaacggccagcccgagaacaactacaagaccaccccccccgtgctggactccgacggctccttcttcctgtactccaagctgaccgtggacaagtccaggtggcagcagggcaacgtgttctcctgctccgtgatgcacgaggccctgcacaaccactacacccagaagtccctgtccctgtcccccggcaag

SEQ ID NO: 211 - protein, 214 aa, Artificial Sequence; identical to SEQ ID NO: 171
  humanized HM242-C3-X3-KSI Light Chain PRT

SEQ ID NO: 212 - DNA, 642 bp, Artificial Sequence; identical to SEQ ID NO: 172
  humanized HM242-C3-X3-KSI Light Chain DNA

SEQ ID NO: 213 - protein, 447 aa, Artificial Sequence
  humanized HM242-C3-X3-KSL Heavy Chain PRT
QVQLVQSGPEVKKPGASVKVVCKASGYTFTSYYIQWVKQRPGQGLEWIGWIYPGDGTTKYNEKFKGRVTMTIDKSTRTAYMELRSLRSDDTAVYYCASYYGSYFDYWGQGTLVTVSSASTKGPSVFPLAPSSKSTSGGTAALGCLVKDYFPEPVTVSWNSGALTSGVHTFPAVLQSSGLYSLSSVVTVPSSSLGTQTYICNVNHKPSNTKVDKKVEPKSCDKTHTCPPCPAPELLGGPDVFLFPPKPKDTLMISRTPEVTCVVVDVGDEDPEVKFNWYVDGVEVHNAKTKPREEQYNSTYRVVSVLTVLHQDWLNGKEYKCAVSNKAYPAPIEKTISKAKGQPREPQVYTLPPSRDELTKNQVSLTCLVKGFYPSDIAVEWESNGQPENNYKTTPPVLDSDGSFFLYSKLTVDKSRWQQGNVFSCSVMHEALHNHYTQKSLSLSPGK

SEQ ID NO: 214 - DNA, 1341 bp, Artificial Sequence
  humanized HM242-C3-X3-KSL Heavy Chain DNA
caggtgcagttggtccagagtggaccagaggtgaagaagcctggggccagtgtgaaggtggtctgcaaggcatcaggatacacgtttaccagctattacatccagtgggtgaagcaacgtcctggtcagggacttgaatggattgggtggatttaccccggtgatggcactactaagtacaatgagaagttcaaaggacgagtcaccatgaccatcgataagtcaactcgcacagcctatatggagctgagaagtctgcgctctgacgatacagctgtgtattactgcgcctcctactatgggtcctacttcgactattggggccagggcactctggtcaccgtgtctagtgcctccaccaaaggcccctctgtgtttccactggcaccaagctcaaagtcaaccagtggtggaaccgctgctctgggctgtctggttaaggactatttccccgaacctgtaaccgtaagctggaatagtggcgcactgacctccggggtccacacatttcccgccgtgctgcagagttcaggcctctattccctcagctccgtcgtgactgtcccctcctcttcccttggtactcagacttacatctgcaacgtgaaccacaagccctccaacaccaaggtggacaagaaggtcgagcccaagtcctgcgacaagacccacacctgccccccctgccccgcccccgagctgctgggcggccccgacgtgttcctgttcccccccaagcccaaggacaccctgatgatctccaggacccccgaggtgacctgcgtggtggtggacgtgggcgacgaggaccccgaggtgaagttcaactggtacgtggacggcgtggaggtgcacaacgccaagaccaagcccagggaggagcagtacaactccacctacagggtggtgtccgtgctgaccgtgctgcaccaggactggctgaacggcaaggagtacaagtgcgccgtgtccaacaaggcctaccccgcccccatcgagaagaccatctccaaggccaagggccagcccagggagccccaggtgtacaccctgcccccctccagggacgagctgaccaagaaccaggtgtccctgacctgcctggtgaagggcttctacccctccgacatcgccgtggagtgggagtccaacggccagcccgagaacaactacaagaccaccccccccgtgctggactccgacggctccttcttcctgtactccaagctgaccgtggacaagtccaggtggcagcagggcaacgtgttctcctgctccgtgatgcacgaggccctgcacaaccactacacccagaagtccctgtccctgtcccccggcaag

SEQ ID NO: 215 - protein, 214 aa, Artificial Sequence; identical to SEQ ID NO: 171
  humanized HM242-C3-X3-KSL Light Chain PRT

SEQ ID NO: 216 - DNA, 642 bp, Artificial Sequence; identical to SEQ ID NO: 172
  humanized HM242-C3-X3-KSL Light Chain DNA

SEQ ID NO: 217 - protein, 447 aa, Artificial Sequence
  humanized HM242-C3-X4-K Heavy Chain PRT
QVQLVQSGPEVKKPGASVKVVCKASGYTFTSYYIQWVKQRPGQGLEWIGWIYPGDGTTKYNEKFKGRVTMTIDKSTRTAYMELRSLRSDDTAVYYCASYYGSYFDYWGQGTLVTVSSASTKGPSVFPLAPSSKSTSGGTAALGCLVKDYFPEPVTVSWNSGALTSGVHTFPAVLQSSGLYSLSSVVTVPSSSLGTQTYICNVNHKPSNTKVDKKVEPKSCDKTHTCPPCPAPELLGGPDVFLFPPKPKDTLMISRTPEVTCVVVDVSDEDPEVKFNWYVDGVEVHNAKTKPREEQYNSTYRVVSVLTVLHQDWLNGKEYKCAVSNKAYPAPEEKTISKAKGQPREPQVYTLPPSRDELTKNQVSLTCLVKGFYPSDIAVEWESNGQPENNYKTTPPVLDSDGSFFLYSKLTVDKSRWQQGNVFSCSVMHEALHNHYTQKSLSLSPGK

SEQ ID NO: 218 - DNA, 1341 bp, Artificial Sequence
  humanized HM242-C3-X4-K Heavy Chain DNA
caggtgcagttggtccagagtggaccagaggtgaagaagcctggggccagtgtgaaggtggtctgcaaggcatcaggatacacgtttaccagctattacatccagtgggtgaagcaacgtcctggtcagggacttgaatggattgggtggatttaccccggtgatggcactactaagtacaatgagaagttcaaaggacgagtcaccatgaccatcgataagtcaactcgcacagcctatatggagctgagaagtctgcgctctgacgatacagctgtgtattactgcgcctcctactatgggtcctacttcgactattggggccagggcactctggtcaccgtgtctagtgcctccaccaaaggcccctctgtgtttccactggcaccaagctcaaagtcaaccagtggtggaaccgctgctctgggctgtctggttaaggactatttccccgaacctgtaaccgtaagctggaatagtggcgcactgacctccggggtccacacatttcccgccgtgctgcagagttcaggcctctattccctcagctccgtcgtgactgtcccctcctcttcccttggtactcagacttacatctgcaacgtgaaccacaagccctccaacaccaaggtggacaagaaggtcgagcccaagtcctgcgacaagacccacacctgccccccctgccccgcccccgagctgctgggcggccccgacgtgttcctgttcccccccaagcccaaggacaccctgatgatctccaggacccccgaggtgacctgcgtggtggtggacgtgtccgacgaggaccccgaggtgaagttcaactggtacgtggacggcgtggaggtgcacaacgccaagaccaagcccagggaggagcagtacaactccacctacagggtggtgtccgtgctgaccgtgctgcaccaggactggctgaacggcaaggagtacaagtgcgccgtgtccaacaaggcctaccccgcccccgaggagaagaccatctccaaggccaagggccagcccagggagccccaggtgtacaccctgcccccctccagggacgagctgaccaagaaccaggtgtccctgacctgcctggtgaagggcttctacccctccgacatcgccgtggagtgggagtccaacggccagcccgagaacaactacaagaccaccccccccgtgctggactccgacggctccttcttcctgtactccaagctgaccgtggacaagtccaggtggcagcagggcaacgtgttctcctgctccgtgatgcacgaggccctgcacaaccactacacccagaagtccctgtccctgtcccccggcaag

SEQ ID NO: 219 - protein, 214 aa, Artificial Sequence; identical to SEQ ID NO: 171
  humanized HM242-C3-X4-K Light Chain PRT

SEQ ID NO: 220 - DNA, 642 bp, Artificial Sequence; identical to SEQ ID NO: 172
  humanized HM242-C3-X4-K Light Chain DNA

SEQ ID NO: 221 - protein, 447 aa, Artificial Sequence
  humanized HM242-C3-X4-KS Heavy Chain PRT
QVQLVQSGPEVKKPGASVKVVCKASGYTFTSYYIQWVKQRPGQGLEWIGWIYPGDGTTKYNEKFKGRVTMTIDKSTRTAYMELRSLRSDDTAVYYCASYYGSYFDYWGQGTLVTVSSASTKGPSVFPLAPSSKSTSGGTAALGCLVKDYFPEPVTVSWNSGALTSGVHTFPAVLQSSGLYSLSSVVTVPSSSLGTQTYICNVNHKPSNTKVDKKVEPKSCDKTHTCPPCPAPELLGGPDVFLFPPKPKDTLMISRTPEVTCVVVDVGDEDPEVKFNWYVDGVEVHNAKTKPREEQYNSTYRVVSVLTVLHQDWLNGKEYKCAVSNKAYPAPEEKTISKAKGQPREPQVYTLPPSRDELTKNQVSLTCLVKGFYPSDIAVEWESNGQPENNYKTTPPVLDSDGSFFLYSKLTVDKSRWQQGNVFSCSVMHEALHNHYTQKSLSLSPGK

SEQ ID NO: 222 - DNA, 1341 bp, Artificial Sequence
  humanized HM242-C3-X4-KS Heavy Chain DNA
caggtgcagttggtccagagtggaccagaggtgaagaagcctggggccagtgtgaaggtggtctgcaaggcatcaggatacacgtttaccagctattacatccagtgggtgaagcaacgtcctggtcagggacttgaatggattgggtggatttaccccggtgatggcactactaagtacaatgagaagttcaaaggacgagtcaccatgaccatcgataagtcaactcgcacagcctatatggagctgagaagtctgcgctctgacgatacagctgtgtattactgcgcctcctactatgggtcctacttcgactattggggccagggcactctggtcaccgtgtctagtgcctccaccaaaggcccctctgtgtttccactggcaccaagctcaaagtcaaccagtggtggaaccgctgctctgggctgtctggttaaggactatttccccgaacctgtaaccgtaagctggaatagtggcgcactgacctccggggtccacacatttcccgccgtgctgcagagttcaggcctctattccctcagctccgtcgtgactgtcccctcctcttcccttggtactcagacttacatctgcaacgtgaaccacaagccctccaacaccaaggtggacaagaaggtcgagcccaagtcctgcgacaagacccacacctgccccccctgccccgcccccgagctgctgggcggccccgacgtgttcctgttcccccccaagcccaaggacaccctgatgatctccaggacccccgaggtgacctgcgtggtggtggacgtgggcgacgaggaccccgaggtgaagttcaactggtacgtggacggcgtggaggtgcacaacgccaagaccaagcccagggaggagcagtacaactccacctacagggtggtgtccgtgctgaccgtgctgcaccaggactggctgaacggcaaggagtacaagtgcgccgtgtccaacaaggcctaccccgcccccgaggagaagaccatctccaaggccaagggccagcccagggagccccaggtgtacaccctgcccccctccagggacgagctgaccaagaaccaggtgtccctgacctgcctggtgaagggcttctacccctccgacatcgccgtggagtgggagtccaacggccagcccgagaacaactacaagaccaccccccccgtgctggactccgacggctccttcttcctgtactccaagctgaccgtggacaagtccaggtggcagcagggcaacgtgttctcctgctccgtgatgcacgaggccctgcacaaccactacacccagaagtccctgtccctgtcccccggcaag

SEQ ID NO: 223 - protein, 214 aa, Artificial Sequence; identical to SEQ ID NO: 171
  humanized HM242-C3-X4-KS Light Chain PRT

SEQ ID NO: 224 - DNA, 642 bp, Artificial Sequence; identical to SEQ ID NO: 172
  humanized HM242-C3-X4-KS Light Chain DNA

SEQ ID NO: 225 - protein, 447 aa, Artificial Sequence
  humanized HM242-D3-X2-K Heavy Chain PRT
QVQLVQSGPEVKKPGASVKVVCKASGYTFTSYYIQWVRQVPGQGLEWMGWIYPGDGTTKYNEKFKGRVTMTIDTSTSTAYMELRSLRSDDTAVYYCASYYGSYFDYWGQGTLVTVSSASTKGPSVFPLAPSSKSTSGGTAALGCLVKDYFPEPVTVSWNSGALTSGVHTFPAVLQSSGLYSLSSVVTVPSSSLGTQTYICNVNHKPSNTKVDKKVEPKSCDKTHTCPPCPAPELLDGPSVFLFPPKPKDTLMISRTPEVTCVVVDVSDEDPEVKFNWYVDGVEVHNAKTKPREEQYNSTYRVVSVLTVLHQDWLNGKEYKCAVSNKALPAPIEKTISKAKGQPREPQVYTLPPSRDELTKNQVSLTCLVKGFYPSDIAVEWESNGQPENNYKTTPPVLDSDGSFFLYSKLTVDKSRWQQGNVFSCSVMHEALHNHYTQKSLSLSPGK

SEQ ID NO: 226 - DNA, 1341 bp, Artificial Sequence
  humanized HM242-D3-X2-K Heavy Chain DNA
caggtgcagctggttcagagcggtcccgaggtgaagaaaccaggtgcttccgtgaaggtagtttgcaaagccagtggctatactttcacctcctattacatccaatgggtgagacaggtgcctggccaaggtcttgagtggatggggtggatctatcccggcgatggtaccactaagtacaacgagaagttcaaagggagggttacgatgaccattgacacctcaactagcactgcttatatggaactgagatctctgcgatccgatgacacagcagtgtactactgcgcaagctactacggatcttactttgactattggggacaaggaactctggtcacagtgtctagtgcctcaaccaagggaccatccgtgttcccattggctcccagttccaaaagcaccagtggtggcaccgctgcccttggatgcctcgtaaaggactactttcctgagcccgtgacggtatcctggaactccggagcacttacatctggggtgcacacctttcctgccgtcctgcagtcatctggcctgtattctctgtcctctgtggtgacagtgcctagcagttctttgggaactcagacctacatctgcaacgtgaaccacaagccctccaacaccaaggtggacaagaaggtcgagcccaagtcctgcgacaagacccacacctgccccccctgccccgcccccgagctgctggacggcccctccgtgttcctgttcccccccaagcccaaggacaccctgatgatctccaggacccccgaggtgacctgcgtggtggtggacgtgtccgacgaggaccccgaggtgaagttcaactggtacgtggacggcgtggaggtgcacaacgccaagaccaagcccagggaggagcagtacaactccacctacagggtggtgtccgtgctgaccgtgctgcaccaggactggctgaacggcaaggagtacaagtgcgccgtgtccaacaaggccctgcccgcccccatcgagaagaccatctccaaggccaagggccagcccagggagccccaggtgtacaccctgcccccctccagggacgagctgaccaagaaccaggtgtccctgacctgcctggtgaagggcttctacccctccgacatcgccgtggagtgggagtccaacggccagcccgagaacaactacaagaccaccccccccgtgctggactccgacggctccttcttcctgtactccaagctgaccgtggacaagtccaggtggcagcagggcaacgtgttctcctgctccgtgatgcacgaggccctgcacaaccactacacccagaagtccctgtccctgtcccccggcaag

SEQ ID NO: 227 - protein, 214 aa, Artificial Sequence; identical to SEQ ID NO: 171
  humanized HM242-D3-X2-K Light Chain PRT

SEQ ID NO: 228 - DNA, 642 bp, Artificial Sequence; identical to SEQ ID NO: 172
  humanized HM242-D3-X2-K Light Chain DNA

SEQ ID NO: 229 - protein, 447 aa, Artificial Sequence
  humanized HM242-D3-X3-K Heavy Chain PRT
QVQLVQSGPEVKKPGASVKVVCKASGYTFTSYYIQWVRQVPGQGLEWMGWIYPGDGTTKYNEKFKGRVTMTIDTSTSTAYMELRSLRSDDTAVYYCASYYGSYFDYWGQGTLVTVSSASTKGPSVFPLAPSSKSTSGGTAALGCLVKDYFPEPVTVSWNSGALTSGVHTFPAVLQSSGLYSLSSVVTVPSSSLGTQTYICNVNHKPSNTKVDKKVEPKSCDKTHTCPPCPAPELLGGPDVFLFPPKPKDTLMISRTPEVTCVVVDVSDEDPEVKFNWYVDGVEVHNAKTKPREEQYNSTYRVVSVLTVLHQDWLNGKEYKCAVSNKALPAPIEKTISKAKGQPREPQVYTLPPSRDELTKNQVSLTCLVKGFYPSDIAVEWESNGQPENNYKTTPPVLDSDGSFFLYSKLTVDKSRWQQGNVFSCSVMHEALHNHYTQKSLSLSPGK

SEQ ID NO: 230 - DNA, 1341 bp, Artificial Sequence
  humanized HM242-D3-X3-K Heavy Chain DNA
caggtgcagctggttcagagcggtcccgaggtgaagaaaccaggtgcttccgtgaaggtagtttgcaaagccagtggctatactttcacctcctattacatccaatgggtgagacaggtgcctggccaaggtcttgagtggatggggtggatctatcccggcgatggtaccactaagtacaacgagaagttcaaagggagggttacgatgaccattgacacctcaactagcactgcttatatggaactgagatctctgcgatccgatgacacagcagtgtactactgcgcaagctactacggatcttactttgactattggggacaaggaactctggtcacagtgtctagtgcctccaccaaaggcccctctgtgtttccactggcaccaagctcaaagtcaaccagtggtggaaccgctgctctgggctgtctggttaaggactatttccccgaacctgtaaccgtaagctggaatagtggcgcactgacctccggggtccacacatttcccgccgtgctgcagagttcaggcctctattccctcagctccgtcgtgactgtcccctcctcttcccttggtactcagacttacatctgcaacgtgaaccacaagccctccaacaccaaggtggacaagaaggtcgagcccaagtcctgcgacaagacccacacctgccccccctgccccgcccccgagctgctgggcggccccgacgtgttcctgttcccccccaagcccaaggacaccctgatgatctccaggacccccgaggtgacctgcgtggtggtggacgtgagtgacgaggaccccgaggtgaagttcaactggtacgtggacggcgtggaggtgcacaacgccaagaccaagcccagggaggagcagtacaactccacctacagggtggtgtccgtgctgaccgtgctgcaccaggactggctgaacggcaaggagtacaagtgcgccgtgtccaacaaggccctgcccgcccccatcgagaagaccatctccaaggccaagggccagcccagggagccccaggtgtacaccctgcccccctccagggacgagctgaccaagaaccaggtgtccctgacctgcctggtgaagggcttctacccctccgacatcgccgtggagtgggagtccaacggccagcccgagaacaactacaagaccaccccccccgtgctggactccgacggctccttcttcctgtactccaagctgaccgtggacaagtccaggtggcagcagggcaacgtgttctcctgctccgtgatgcacgaggccctgcacaaccactacacccagaagtccctgtccctgtcccccggcaag

SEQ ID NO: 231 - protein, 214 aa, Artificial Sequence; identical to SEQ ID NO: 171
  humanized HM242-D3-X3-K Light Chain PRT

SEQ ID NO: 232 - DNA, 642 bp, Artificial Sequence; identical to SEQ ID NO: 172
  humanized HM242-D3-X3-K Light Chain DNA

SEQ ID NO: 233 - protein, 447 aa, Artificial Sequence
  humanized HM242-D3-X3-KE Heavy Chain PRT
QVQLVQSGPEVKKPGASVKVVCKASGYTFTSYYIQWVRQVPGQGLEWMGWIYPGDGTTKYNEKFKGRVTMTIDTSTSTAYMELRSLRSDDTAVYYCASYYGSYFDYWGQGTLVTVSSASTKGPSVFPLAPSSKSTSGGTAALGCLVKDYFPEPVTVSWNSGALTSGVHTFPAVLQSSGLYSLSSVVTVPSSSLGTQTYICNVNHKPSNTKVDKKVEPKSCDKTHTCPPCPAPELLGGPDVFLFPPKPKDTLMISRTPEVTCVVVDVSDEDPEVKFNWYVDGVEVHNAKTKPRAEQYNSTYRVVSVLTVLHQDWLNGKEYKCAVSNKALPAPIEKTISKAKGQPREPQVYTLPPSRDELTKNQVSLTCLVKGFYPSDIAVEWESNGQPENNYKTTPPVLDSDGSFFLYSKLTVDKSRWQQGNVFSCSVMHEALHNHYTQKSLSLSPGK

SEQ ID NO: 234 - DNA, 1341 bp, Artificial Sequence
  humanized HM242-D3-X3-KE Heavy Chain DNA
caggtgcagctggttcagagcggtcccgaggtgaagaaaccaggtgcttccgtgaaggtagtttgcaaagccagtggctatactttcacctcctattacatccaatgggtgagacaggtgcctggccaaggtcttgagtggatggggtggatctatcccggcgatggtaccactaagtacaacgagaagttcaaagggagggttacgatgaccattgacacctcaactagcactgcttatatggaactgagatctctgcgatccgatgacacagcagtgtactactgcgcaagctactacggatcttactttgactattggggacaaggaactctggtcacagtgtctagtgcctccaccaaaggcccctctgtgtttccactggcaccaagctcaaagtcaaccagtggtggaaccgctgctctgggctgtctggttaaggactatttccccgaacctgtaaccgtaagctggaatagtggcgcactgacctccggggtccacacatttcccgccgtgctgcagagttcaggcctctattccctcagctccgtcgtgactgtcccctcctcttcccttggtactcagacttacatctgcaacgtgaaccacaagccctccaacaccaaggtggacaagaaggtcgagcccaagtcctgcgacaagacccacacctgccccccctgccccgcccccgagctgctgggcggccccgacgtgttcctgttcccccccaagcccaaggacaccctgatgatctccaggacccccgaggtgacctgcgtggtggtggacgtgagtgacgaggaccccgaggtgaagttcaactggtacgtggacggcgtggaggtgcacaacgccaagaccaagcccagggccgagcagtacaactccacctacagggtggtgtccgtgctgaccgtgctgcaccaggactggctgaacggcaaggagtacaagtgcgccgtgtccaacaaggccctgcccgcccccatcgagaagaccatctccaaggccaagggccagcccagggagccccaggtgtacaccctgcccccctccagggacgagctgaccaagaaccaggtgtccctgacctgcctggtgaagggcttctacccctccgacatcgccgtggagtgggagtccaacggccagcccgagaacaactacaagaccaccccccccgtgctggactccgacggctccttcttcctgtactccaagctgaccgtggacaagtccaggtggcagcagggcaacgtgttctcctgctccgtgatgcacgaggccctgcacaaccactacacccagaagtccctgtccctgtcccccggcaag

SEQ ID NO: 235 - protein, 214 aa, Artificial Sequence; identical to SEQ ID NO: 171
  humanized HM242-D3-X3-KE Light Chain PRT

SEQ ID NO: 236 - DNA, 642 bp, Artificial Sequence; identical to SEQ ID NO: 172
  humanized HM242-D3-X3-KE Light Chain DNA

SEQ ID NO: 237 - protein, 447 aa, Artificial Sequence
  humanized HM242-D3-X3-KI Heavy Chain PRT
QVQLVQSGPEVKKPGASVKVVCKASGYTFTSYYIQWVRQVPGQGLEWMGWIYPGDGTTKYNEKFKGRVTMTIDTSTSTAYMELRSLRSDDTAVYYCASYYGSYFDYWGQGTLVTVSSASTKGPSVFPLAPSSKSTSGGTAALGCLVKDYFPEPVTVSWNSGALTSGVHTFPAVLQSSGLYSLSSVVTVPSSSLGTQTYICNVNHKPSNTKVDKKVEPKSCDKTHTCPPCPAPELLGGPDVFLFPPKPKDTLMISRTPEVTCVVVDVSDEDPEVKFNWYVDGVEVHNAKTKPREEQYNSTYRVVSVLTVLHQDWLNGKEYKCAVSNKALPAPEEKTISKAKGQPREPQVYTLPPSRDELTKNQVSLTCLVKGFYPSDIAVEWESNGQPENNYKTTPPVLDSDGSFFLYSKLTVDKSRWQQGNVFSCSVMHEALHNHYTQKSLSLSPGK

SEQ ID NO: 238 - DNA, 1341 bp, Artificial Sequence
  humanized HM242-D3-X3-KI Heavy Chain DNA
caggtgcagctggttcagagcggtcccgaggtgaagaaaccaggtgcttccgtgaaggtagtttgcaaagccagtggctatactttcacctcctattacatccaatgggtgagacaggtgcctggccaaggtcttgagtggatggggtggatctatcccggcgatggtaccactaagtacaacgagaagttcaaagggagggttacgatgaccattgacacctcaactagcactgcttatatggaactgagatctctgcgatccgatgacacagcagtgtactactgcgcaagctactacggatcttactttgactattggggacaaggaactctggtcacagtgtctagtgcctccaccaaaggcccctctgtgtttccactggcaccaagctcaaagtcaaccagtggtggaaccgctgctctgggctgtctggttaaggactatttccccgaacctgtaaccgtaagctggaatagtggcgcactgacctccggggtccacacatttcccgccgtgctgcagagttcaggcctctattccctcagctccgtcgtgactgtcccctcctcttcccttggtactcagacttacatctgcaacgtgaaccacaagccctccaacaccaaggtggacaagaaggtcgagcccaagtcctgcgacaagacccacacctgccccccctgccccgcccccgagctgctgggcggccccgacgtgttcctgttcccccccaagcccaaggacaccctgatgatctccaggacccccgaggtgacctgcgtggtggtggacgtgtccgacgaggaccccgaggtgaagttcaactggtacgtggacggcgtggaggtgcacaacgccaagaccaagcccagggaggagcagtacaactccacctacagggtggtgtccgtgctgaccgtgctgcaccaggactggctgaacggcaaggagtacaagtgcgccgtgtccaacaaggccctgcccgcccccgaggagaagaccatctccaaggccaagggccagcccagggagccccaggtgtacaccctgcccccctccagggacgagctgaccaagaaccaggtgtccctgacctgcctggtgaagggcttctacccctccgacatcgccgtggagtgggagtccaacggccagcccgagaacaactacaagaccaccccccccgtgctggactccgacggctccttcttcctgtactccaagctgaccgtggacaagtccaggtggcagcagggcaacgtgttctcctgctccgtgatgcacgaggccctgcacaaccactacacccagaagtccctgtccctgtcccccggcaag

SEQ ID NO: 239 - protein, 214 aa, Artificial Sequence; identical to SEQ ID NO: 171
  humanized HM242-D3-X3-KI Light Chain PRT

SEQ ID NO: 240 - DNA, 642 bp, Artificial Sequence; identical to SEQ ID NO: 172
  humanized HM242-D3-X3-KI Light Chain DNA

SEQ ID NO: 241 - protein, 447 aa, Artificial Sequence
  humanized HM242-D3-X3-KL Heavy Chain PRT
QVQLVQSGPEVKKPGASVKVVCKASGYTFTSYYIQWVRQVPGQGLEWMGWIYPGDGTTKYNEKFKGRVTMTIDTSTSTAYMELRSLRSDDTAVYYCASYYGSYFDYWGQGTLVTVSSASTKGPSVFPLAPSSKSTSGGTAALGCLVKDYFPEPVTVSWNSGALTSGVHTFPAVLQSSGLYSLSSVVTVPSSSLGTQTYICNVNHKPSNTKVDKKVEPKSCDKTHTCPPCPAPELLGGPDVFLFPPKPKDTLMISRTPEVTCVVVDVSDEDPEVKFNWYVDGVEVHNAKTKPREEQYNSTYRVVSVLTVLHQDWLNGKEYKCAVSNKAYPAPIEKTISKAKGQPREPQVYTLPPSRDELTKNQVSLTCLVKGFYPSDIAVEWESNGQPENNYKTTPPVLDSDGSFFLYSKLTVDKSRWQQGNVFSCSVMHEALHNHYTQKSLSLSPGK

SEQ ID NO: 242 - DNA, 1341 bp, Artificial Sequence
  humanized HM242-D3-X3-KL Heavy Chain DNA
caggtgcagctggttcagagcggtcccgaggtgaagaaaccaggtgcttccgtgaaggtagtttgcaaagccagtggctatactttcacctcctattacatccaatgggtgagacaggtgcctggccaaggtcttgagtggatggggtggatctatcccggcgatggtaccactaagtacaacgagaagttcaaagggagggttacgatgaccattgacacctcaactagcactgcttatatggaactgagatctctgcgatccgatgacacagcagtgtactactgcgcaagctactacggatcttactttgactattggggacaaggaactctggtcacagtgtctagtgcctccaccaaaggcccctctgtgtttccactggcaccaagctcaaagtcaaccagtggtggaaccgctgctctgggctgtctggttaaggactatttccccgaacctgtaaccgtaagctggaatagtggcgcactgacctccggggtccacacatttcccgccgtgctgcagagttcaggcctctattccctcagctccgtcgtgactgtcccctcctcttcccttggtactcagacttacatctgcaacgtgaaccacaagccctccaacaccaaggtggacaagaaggtcgagcccaagtcctgcgacaagacccacacctgccccccctgccccgcccccgagctgctgggcggccccgacgtgttcctgttcccccccaagcccaaggacaccctgatgatctccaggacccccgaggtgacctgcgtggtggtggacgtgtccgacgaggaccccgaggtgaagttcaactggtacgtggacggcgtggaggtgcacaacgccaagaccaagcccagggaggagcagtacaactccacctacagggtggtgtccgtgctgaccgtgctgcaccaggactggctgaacggcaaggagtacaagtgcgccgtgtccaacaaggcctaccccgcccccatcgagaagaccatctccaaggccaagggccagcccagggagccccaggtgtacaccctgcccccctccagggacgagctgaccaagaaccaggtgtccctgacctgcctggtgaagggcttctacccctccgacatcgccgtggagtgggagtccaacggccagcccgagaacaactacaagaccaccccccccgtgctggactccgacggctccttcttcctgtactccaagctgaccgtggacaagtccaggtggcagcagggcaacgtgttctcctgctccgtgatgcacgaggccctgcacaaccactacacccagaagtccctgtccctgtcccccggcaag

SEQ ID NO: 243 - protein, 214 aa, Artificial Sequence; identical to SEQ ID NO: 171
  humanized HM242-D3-X3-KL Light Chain PRT

SEQ ID NO: 244 - DNA, 642 bp, Artificial Sequence; identical to SEQ ID NO: 172
  humanized HM242-D3-X3-KL Light Chain DNA

SEQ ID NO: 245 - protein, 447 aa, Artificial Sequence
  humanized HM242-D3-X3-KS Heavy Chain PRT
QVQLVQSGPEVKKPGASVKVVCKASGYTFTSYYIQWVRQVPGQGLEWMGWIYPGDGTTKYNEKFKGRVTMTIDTSTSTAYMELRSLRSDDTAVYYCASYYGSYFDYWGQGTLVTVSSASTKGPSVFPLAPSSKSTSGGTAALGCLVKDYFPEPVTVSWNSGALTSGVHTFPAVLQSSGLYSLSSVVTVPSSSLGTQTYICNVNHKPSNTKVDKKVEPKSCDKTHTCPPCPAPELLGGPDVFLFPPKPKDTLMISRTPEVTCVVVDVGDEDPEVKFNWYVDGVEVHNAKTKPREEQYNSTYRVVSVLTVLHQDWLNGKEYKCAVSNKALPAPIEKTISKAKGQPREPQVYTLPPSRDELTKNQVSLTCLVKGFYPSDIAVEWESNGQPENNYKTTPPVLDSDGSFFLYSKLTVDKSRWQQGNVFSCSVMHEALHNHYTQKSLSLSPGK

SEQ ID NO: 246 - DNA, 1341 bp, Artificial Sequence
  humanized HM242-D3-X3-KS Heavy Chain DNA
caggtgcagctggttcagagcggtcccgaggtgaagaaaccaggtgcttccgtgaaggtagtttgcaaagccagtggctatactttcacctcctattacatccaatgggtgagacaggtgcctggccaaggtcttgagtggatggggtggatctatcccggcgatggtaccactaagtacaacgagaagttcaaagggagggttacgatgaccattgacacctcaactagcactgcttatatggaactgagatctctgcgatccgatgacacagcagtgtactactgcgcaagctactacggatcttactttgactattggggacaaggaactctggtcacagtgtctagtgcctcaaccaagggaccatccgtgttcccattggctcccagttccaaaagcaccagtggtggcaccgctgcccttggatgcctcgtaaaggactactttcctgagcccgtgacggtatcctggaactccggagcacttacatctggggtgcacacctttcctgccgtcctgcagtcatctggcctgtattctctgtcctctgtggtgacagtgcctagcagttctttgggaactcagacctacatctgcaacgtgaaccacaagccctccaacaccaaggtggacaagaaggtcgagcccaagtcctgcgacaagacccacacctgccccccctgccccgcccccgagctgctgggcggccccgacgtgttcctgttcccccccaagcccaaggacaccctgatgatctccaggacccccgaggtgacctgcgtggtggtggacgtgggcgacgaggaccccgaggtgaagttcaactggtacgtggacggcgtggaggtgcacaacgccaagaccaagcccagggaggagcagtacaactccacctacagggtggtgtccgtgctgaccgtgctgcaccaggactggctgaacggcaaggagtacaagtgcgccgtgtccaacaaggccctgcccgcccccatcgagaagaccatctccaaggccaagggccagcccagggagccccaggtgtacaccctgcccccctccagggacgagctgaccaagaaccaggtgtccctgacctgcctggtgaagggcttctacccctccgacatcgccgtggagtgggagtccaacggccagcccgagaacaactacaagaccaccccccccgtgctggactccgacggctccttcttcctgtactccaagctgaccgtggacaagtccaggtggcagcagggcaacgtgttctcctgctccgtgatgcacgaggccctgcacaaccactacacccagaagtccctgtccctgtcccccggcaag

SEQ ID NO: 247 - protein, 214 aa, Artificial Sequence; identical to SEQ ID NO: 171
  humanized HM242-D3-X3-KS Light Chain PRT

SEQ ID NO: 248 - DNA, 642 bp, Artificial Sequence; identical to SEQ ID NO: 172
  humanized HM242-D3-X3-KS Light Chain DNA

SEQ ID NO: 249 - protein, 447 aa, Artificial Sequence
  humanized HM242-D3-X3-KSI Heavy Chain PRT
QVQLVQSGPEVKKPGASVKVVCKASGYTFTSYYIQWVRQVPGQGLEWMGWIYPGDGTTKYNEKFKGRVTMTIDTSTSTAYMELRSLRSDDTAVYYCASYYGSYFDYWGQGTLVTVSSASTKGPSVFPLAPSSKSTSGGTAALGCLVKDYFPEPVTVSWNSGALTSGVHTFPAVLQSSGLYSLSSVVTVPSSSLGTQTYICNVNHKPSNTKVDKKVEPKSCDKTHTCPPCPAPELLGGPDVFLFPPKPKDTLMISRTPEVTCVVVDVGDEDPEVKFNWYVDGVEVHNAKTKPREEQYNSTYRVVSVLTVLHQDWLNGKEYKCAVSNKALPAPEEKTISKAKGQPREPQVYTLPPSRDELTKNQVSLTCLVKGFYPSDIAVEWESNGQPENNYKTTPPVLDSDGSFFLYSKLTVDKSRWQQGNVFSCSVMHEALHNHYTQKSLSLSPGK

SEQ ID NO: 250 - DNA, 1341 bp, Artificial Sequence
  humanized HM242-D3-X3-KSI Heavy Chain DNA
caggtgcagctggttcagagcggtcccgaggtgaagaaaccaggtgcttccgtgaaggtagtttgcaaagccagtggctatactttcacctcctattacatccaatgggtgagacaggtgcctggccaaggtcttgagtggatggggtggatctatcccggcgatggtaccactaagtacaacgagaagttcaaagggagggttacgatgaccattgacacctcaactagcactgcttatatggaactgagatctctgcgatccgatgacacagcagtgtactactgcgcaagctactacggatcttactttgactattggggacaaggaactctggtcacagtgtctagtgcctccaccaaaggcccctctgtgtttccactggcaccaagctcaaagtcaaccagtggtggaaccgctgctctgggctgtctggttaaggactatttccccgaacctgtaaccgtaagctggaatagtggcgcactgacctccggggtccacacatttcccgccgtgctgcagagttcaggcctctattccctcagctccgtcgtgactgtcccctcctcttcccttggtactcagacttacatctgcaacgtgaaccacaagccctccaacaccaaggtggacaagaaggtcgagcccaagtcctgcgacaagacccacacctgccccccctgccccgcccccgagctgctgggcggccccgacgtgttcctgttcccccccaagcccaaggacaccctgatgatctccaggacccccgaggtgacctgcgtggtggtggacgtgggcgacgaggaccccgaggtgaagttcaactggtacgtggacggcgtggaggtgcacaacgccaagaccaagcccagggaggagcagtacaactccacctacagggtggtgtccgtgctgaccgtgctgcaccaggactggctgaacggcaaggagtacaagtgcgccgtgtccaacaaggccctgcccgcccccgaggagaagaccatctccaaggccaagggccagcccagggagccccaggtgtacaccctgcccccctccagggacgagctgaccaagaaccaggtgtccctgacctgcctggtgaagggcttctacccctccgacatcgccgtggagtgggagtccaacggccagcccgagaacaactacaagaccaccccccccgtgctggactccgacggctccttcttcctgtactccaagctgaccgtggacaagtccaggtggcagcagggcaacgtgttctcctgctccgtgatgcacgaggccctgcacaaccactacacccagaagtccctgtccctgtcccccggcaag

SEQ ID NO: 251 - protein, 214 aa, Artificial Sequence; identical to SEQ ID NO: 171
  humanized HM242-D3-X3-KSI Light Chain PRT

SEQ ID NO: 252 - DNA, 642 bp, Artificial Sequence; identical to SEQ ID NO: 172
  humanized HM242-D3-X3-KSI Light Chain DNA

SEQ ID NO: 253 - protein, 447 aa, Artificial Sequence
  humanized HM242-D3-X3-KSL Heavy Chain PRT
QVQLVQSGPEVKKPGASVKVVCKASGYTFTSYYIQWVRQVPGQGLEWMGWIYPGDGTTKYNEKFKGRVTMTIDTSTSTAYMELRSLRSDDTAVYYCASYYGSYFDYWGQGTLVTVSSASTKGPSVFPLAPSSKSTSGGTAALGCLVKDYFPEPVTVSWNSGALTSGVHTFPAVLQSSGLYSLSSVVTVPSSSLGTQTYICNVNHKPSNTKVDKKVEPKSCDKTHTCPPCPAPELLGGPDVFLFPPKPKDTLMISRTPEVTCVVVDVGDEDPEVKFNWYVDGVEVHNAKTKPREEQYNSTYRVVSVLTVLHQDWLNGKEYKCAVSNKAYPAPIEKTISKAKGQPREPQVYTLPPSRDELTKNQVSLTCLVKGFYPSDIAVEWESNGQPENNYKTTPPVLDSDGSFFLYSKLTVDKSRWQQGNVFSCSVMHEALHNHYTQKSLSLSPGK

SEQ ID NO: 254 - DNA, 1341 bp, Artificial Sequence
  humanized HM242-D3-X3-KSL Heavy Chain DNA
caggtgcagctggttcagagcggtcccgaggtgaagaaaccaggtgcttccgtgaaggtagtttgcaaagccagtggctatactttcacctcctattacatccaatgggtgagacaggtgcctggccaaggtcttgagtggatggggtggatctatcccggcgatggtaccactaagtacaacgagaagttcaaagggagggttacgatgaccattgacacctcaactagcactgcttatatggaactgagatctctgcgatccgatgacacagcagtgtactactgcgcaagctactacggatcttactttgactattggggacaaggaactctggtcacagtgtctagtgcctccaccaaaggcccctctgtgtttccactggcaccaagctcaaagtcaaccagtggtggaaccgctgctctgggctgtctggttaaggactatttccccgaacctgtaaccgtaagctggaatagtggcgcactgacctccggggtccacacatttcccgccgtgctgcagagttcaggcctctattccctcagctccgtcgtgactgtcccctcctcttcccttggtactcagacttacatctgcaacgtgaaccacaagccctccaacaccaaggtggacaagaaggtcgagcccaagtcctgcgacaagacccacacctgccccccctgccccgcccccgagctgctgggcggccccgacgtgttcctgttcccccccaagcccaaggacaccctgatgatctccaggacccccgaggtgacctgcgtggtggtggacgtgggcgacgaggaccccgaggtgaagttcaactggtacgtggacggcgtggaggtgcacaacgccaagaccaagcccagggaggagcagtacaactccacctacagggtggtgtccgtgctgaccgtgctgcaccaggactggctgaacggcaaggagtacaagtgcgccgtgtccaacaaggcctaccccgcccccatcgagaagaccatctccaaggccaagggccagcccagggagccccaggtgtacaccctgcccccctccagggacgagctgaccaagaaccaggtgtccctgacctgcctggtgaagggcttctacccctccgacatcgccgtggagtgggagtccaacggccagcccgagaacaactacaagaccaccccccccgtgctggactccgacggctccttcttcctgtactccaagctgaccgtggacaagtccaggtggcagcagggcaacgtgttctcctgctccgtgatgcacgaggccctgcacaaccactacacccagaagtccctgtccctgtcccccggcaag

SEQ ID NO: 255 - protein, 214 aa, Artificial Sequence; identical to SEQ ID NO: 171
  humanized HM242-D3-X3-KSL Light Chain PRT

SEQ ID NO: 256 - DNA, 642 bp, Artificial Sequence; identical to SEQ ID NO: 172
  humanized HM242-D3-X3-KSL Light Chain DNA

SEQ ID NO: 257 - protein, 447 aa, Artificial Sequence
  humanized HM242-D3-X4-K Heavy Chain PRT
QVQLVQSGPEVKKPGASVKVVCKASGYTFTSYYIQWVRQVPGQGLEWMGWIYPGDGTTKYNEKFKGRVTMTIDTSTSTAYMELRSLRSDDTAVYYCASYYGSYFDYWGQGTLVTVSSASTKGPSVFPLAPSSKSTSGGTAALGCLVKDYFPEPVTVSWNSGALTSGVHTFPAVLQSSGLYSLSSVVTVPSSSLGTQTYICNVNHKPSNTKVDKKVEPKSCDKTHTCPPCPAPELLGGPDVFLFPPKPKDTLMISRTPEVTCVVVDVSDEDPEVKFNWYVDGVEVHNAKTKPREEQYNSTYRVVSVLTVLHQDWLNGKEYKCAVSNKAYPAPEEKTISKAKGQPREPQVYTLPPSRDELTKNQVSLTCLVKGFYPSDIAVEWESNGQPENNYKTTPPVLDSDGSFFLYSKLTVDKSRWQQGNVFSCSVMHEALHNHYTQKSLSLSPGK

SEQ ID NO: 258 - DNA, 1341 bp, Artificial Sequence
  humanized HM242-D3-X4-K Heavy Chain DNA
caggtgcagctggttcagagcggtcccgaggtgaagaaaccaggtgcttccgtgaaggtagtttgcaaagccagtggctatactttcacctcctattacatccaatgggtgagacaggtgcctggccaaggtcttgagtggatggggtggatctatcccggcgatggtaccactaagtacaacgagaagttcaaagggagggttacgatgaccattgacacctcaactagcactgcttatatggaactgagatctctgcgatccgatgacacagcagtgtactactgcgcaagctactacggatcttactttgactattggggacaaggaactctggtcacagtgtctagtgcctcaaccaagggaccatccgtgttcccattggctcccagttccaaaagcaccagtggtggcaccgctgcccttggatgcctcgtaaaggactactttcctgagcccgtgacggtatcctggaactccggagcacttacatctggggtgcacacctttcctgccgtcctgcagtcatctggcctgtattctctgtcctctgtggtgacagtgcctagcagttctttgggaactcagacctacatctgcaacgtgaaccacaagccctccaacaccaaggtggacaagaaggtcgagcccaagtcctgcgacaagacccacacctgccccccctgccccgcccccgagctgctgggcggccccgacgtgttcctgttcccccccaagcccaaggacaccctgatgatctccaggacccccgaggtgacctgcgtggtggtggacgtgtccgacgaggaccccgaggtgaagttcaactggtacgtggacggcgtggaggtgcacaacgccaagaccaagcccagggaggagcagtacaactccacctacagggtggtgtccgtgctgaccgtgctgcaccaggactggctgaacggcaaggagtacaagtgcgccgtgtccaacaaggcctaccccgcccccgaggagaagaccatctccaaggccaagggccagcccagggagccccaggtgtacaccctgcccccctccagggacgagctgaccaagaaccaggtgtccctgacctgcctggtgaagggcttctacccctccgacatcgccgtggagtgggagtccaacggccagcccgagaacaactacaagaccaccccccccgtgctggactccgacggctccttcttcctgtactccaagctgaccgtggacaagtccaggtggcagcagggcaacgtgttctcctgctccgtgatgcacgaggccctgcacaaccactacacccagaagtccctgtccctgtcccccggcaag

SEQ ID NO: 259 - protein, 214 aa, Artificial Sequence; identical to SEQ ID NO: 171
  humanized HM242-D3-X4-K Light Chain PRT

SEQ ID NO: 260 - DNA, 642 bp, Artificial Sequence; identical to SEQ ID NO: 172
  humanized HM242-D3-X4-K Light Chain DNA

SEQ ID NO: 261 - protein, 447 aa, Artificial Sequence
  humanized HM242-D3-X4-KS Heavy Chain PRT
QVQLVQSGPEVKKPGASVKVVCKASGYTFTSYYIQWVRQVPGQGLEWMGWIYPGDGTTKYNEKFKGRVTMTIDTSTSTAYMELRSLRSDDTAVYYCASYYGSYFDYWGQGTLVTVSSASTKGPSVFPLAPSSKSTSGGTAALGCLVKDYFPEPVTVSWNSGALTSGVHTFPAVLQSSGLYSLSSVVTVPSSSLGTQTYICNVNHKPSNTKVDKKVEPKSCDKTHTCPPCPAPELLGGPDVFLFPPKPKDTLMISRTPEVTCVVVDVGDEDPEVKFNWYVDGVEVHNAKTKPREEQYNSTYRVVSVLTVLHQDWLNGKEYKCAVSNKAYPAPEEKTISKAKGQPREPQVYTLPPSRDELTKNQVSLTCLVKGFYPSDIAVEWESNGQPENNYKTTPPVLDSDGSFFLYSKLTVDKSRWQQGNVFSCSVMHEALHNHYTQKSLSLSPGK

SEQ ID NO: 262 - DNA, 1341 bp, Artificial Sequence
  humanized HM242-D3-X4-KS Heavy Chain DNA
caggtgcagctggttcagagcggtcccgaggtgaagaaaccaggtgcttccgtgaaggtagtttgcaaagccagtggctatactttcacctcctattacatccaatgggtgagacaggtgcctggccaaggtcttgagtggatggggtggatctatcccggcgatggtaccactaagtacaacgagaagttcaaagggagggttacgatgaccattgacacctcaactagcactgcttatatggaactgagatctctgcgatccgatgacacagcagtgtactactgcgcaagctactacggatcttactttgactattggggacaaggaactctggtcacagtgtctagtgcctccaccaaaggcccctctgtgtttccactggcaccaagctcaaagtcaaccagtggtggaaccgctgctctgggctgtctggttaaggactatttccccgaacctgtaaccgtaagctggaatagtggcgcactgacctccggggtccacacatttcccgccgtgctgcagagttcaggcctctattccctcagctccgtcgtgactgtcccctcctcttcccttggtactcagacttacatctgcaacgtgaaccacaagccctccaacaccaaggtggacaagaaggtcgagcccaagtcctgcgacaagacccacacctgccccccctgccccgcccccgagctgctgggcggccccgacgtgttcctgttcccccccaagcccaaggacaccctgatgatctccaggacccccgaggtgacctgcgtggtggtggacgtgggcgacgaggaccccgaggtgaagttcaactggtacgtggacggcgtggaggtgcacaacgccaagaccaagcccagggaggagcagtacaactccacctacagggtggtgtccgtgctgaccgtgctgcaccaggactggctgaacggcaaggagtacaagtgcgccgtgtccaacaaggcctaccccgcccccgaggagaagaccatctccaaggccaagggccagcccagggagccccaggtgtacaccctgcccccctccagggacgagctgaccaagaaccaggtgtccctgacctgcctggtgaagggcttctacccctccgacatcgccgtggagtgggagtccaacggccagcccgagaacaactacaagaccaccccccccgtgctggactccgacggctccttcttcctgtactccaagctgaccgtggacaagtccaggtggcagcagggcaacgtgttctcctgctccgtgatgcacgaggccctgcacaaccactacacccagaagtccctgtccctgtcccccggcaag

SEQ ID NO: 263 - protein, 214 aa, Artificial Sequence; identical to SEQ ID NO: 171
  humanized HM242-D3-X4-KS Light Chain PRT

SEQ ID NO: 264 - DNA, 642 bp, Artificial Sequence; identical to SEQ ID NO: 172
  humanized HM242-D3-X4-KS Light Chain DNA

SEQ ID NO: 265 - protein, 447 aa, Artificial Sequence
  humanized HM268-K8-X2-K Heavy Chain PRT
QVQLVQSGPEVKKPGASVKVVCKTSGYTFTSYYIQWLKQRPGQGLEWIGWIYFGDASTKYNEKFKGRVTMTADKSTSTAYMELRSLRSDDTAVYYCASYYGSYFDYWGQGTTVTVSSASTKGPSVFPLAPSSKSTSGGTAALGCLVKDYFPEPVTVSWNSGALTSGVHTFPAVLQSSGLYSLSSVVTVPSSSLGTQTYICNVNHKPSNTKVDKKVEPKSCDKTHTCPPCPAPELLDGPSVFLFPPKPKDTLMISRTPEVTCVVVDVSDEDPEVKFNWYVDGVEVHNAKTKPREEQYNSTYRVVSVLTVLHQDWLNGKEYKCAVSNKALPAPIEKTISKAKGQPREPQVYTLPPSRDELTKNQVSLTCLVKGFYPSDIAVEWESNGQPENNYKTTPPVLDSDGSFFLYSKLTVDKSRWQQGNVFSCSVMHEALHNHYTQKSLSLSPGK

SEQ ID NO: 266 - DNA, 1341 bp, Artificial Sequence
  humanized HM268-K8-X2-K Heavy Chain DNA
caggtgcagctggttcagtccgggcctgaggtgaagaagcccggcgctagtgtgaaggtcgtctgcaaaacttcaggctataccttcacatcctattacatccagtggctgaagcaacgccctggacaagggctcgaatggatcgggtggatctactttggggacgcttctaccaagtacaacgagaagtttaagggacgagtgacaatgaccgccgacaagtccacaagcaccgcctacatggagctcagatccctcaggagcgatgataccgcagtctactattgcgcctcttattacgggtcctacttcgactattggggtcagggaacaacggttacagtctcttccgcctctactaaaggcccttctgtgtttcctctggctccatcctctaagtcaaccagcggcggtactgctgctcttggctgtctggtgaaagactacttccccgaaccagtgaccgtgagttggaacagtggcgcattgacaagcggagtacacacctttccagcagtgttgcagtccagcggcctgtatagcctttcctctgtggtgactgtgccctcaagtagcctgggaacgcagacatacatctgcaacgtgaaccacaagccctccaacaccaaggtggacaagaaggtcgagcccaagtcctgcgacaagacccacacctgccccccctgccccgcccccgagctgctggacggcccctccgtgttcctgttcccccccaagcccaaggacaccctgatgatctccaggacccccgaggtgacctgcgtggtggtggacgtgtccgacgaggaccccgaggtgaagttcaactggtacgtggacggcgtggaggtgcacaacgccaagaccaagcccagggaggagcagtacaactccacctacagggtggtgtccgtgctgaccgtgctgcaccaggactggctgaacggcaaggagtacaagtgcgccgtgtccaacaaggccctgcccgcccccatcgagaagaccatctccaaggccaagggccagcccagggagccccaggtgtacaccctgcccccctccagggacgagctgaccaagaaccaggtgtccctgacctgcctggtgaagggcttctacccctccgacatcgccgtggagtgggagtccaacggccagcccgagaacaactacaagaccaccccccccgtgctggactccgacggctccttcttcctgtactccaagctgaccgtggacaagtccaggtggcagcagggcaacgtgttctcctgctccgtgatgcacgaggccctgcacaaccactacacccagaagtccctgtccctgtcccccggcaag

SEQ ID NO: 267 - protein, 214 aa, Artificial Sequence; identical to SEQ ID NO: 179
  humanized HM268-K8-X2-K Light Chain PRT

SEQ ID NO: 268 - DNA, 642 bp, Artificial Sequence; identical to SEQ ID NO: 180
  humanized HM268-K8-X2-K Light Chain DNA

SEQ ID NO: 269 - protein, 447 aa, Artificial Sequence
  humanized HM268-K8-X3-K Heavy Chain PRT
QVQLVQSGPEVKKPGASVKVVCKTSGYTFTSYYIQWLKQRPGQGLEWIGWIYFGDASTKYNEKFKGRVTMTADKSTSTAYMELRSLRSDDTAVYYCASYYGSYFDYWGQGTTVTVSSASTKGPSVFPLAPSSKSTSGGTAALGCLVKDYFPEPVTVSWNSGALTSGVHTFPAVLQSSGLYSLSSVVTVPSSSLGTQTYICNVNHKPSNTKVDKKVEPKSCDKTHTCPPCPAPELLGGPDVFLFPPKPKDTLMISRTPEVTCVVVDVSDEDPEVKFNWYVDGVEVHNAKTKPREEQYNSTYRVVSVLTVLHQDWLNGKEYKCAVSNKALPAPIEKTISKAKGQPREPQVYTLPPSRDELTKNQVSLTCLVKGFYPSDIAVEWESNGQPENNYKTTPPVLDSDGSFFLYSKLTVDKSRWQQGNVFSCSVMHEALHNHYTQKSLSLSPGK

SEQ ID NO: 270 - DNA, 1341 bp, Artificial Sequence
  humanized HM268-K8-X3-K Heavy Chain DNA
caggtgcagctggttcagtccgggcctgaggtgaagaagcccggcgctagtgtgaaggtcgtctgcaaaacttcaggctataccttcacatcctattacatccagtggctgaagcaacgccctggacaagggctcgaatggatcgggtggatctactttggggacgcttctaccaagtacaacgagaagtttaagggacgagtgacaatgaccgccgacaagtccacaagcaccgcctacatggagctcagatccctcaggagcgatgataccgcagtctactattgcgcctcttattacgggtcctacttcgactattggggtcagggaacaacggttacagtctcttccgcctccaccaaaggcccctctgtgtttccactggcaccaagctcaaagtcaaccagtggtggaaccgctgctctgggctgtctggttaaggactatttccccgaacctgtaaccgtaagctggaatagtggcgcactgacctccggggtccacacatttcccgccgtgctgcagagttcaggcctctattccctcagctccgtcgtgactgtcccctcctcttcccttggtactcagacttacatctgcaacgtgaaccacaagccctccaacaccaaggtggacaagaaggtcgagcccaagtcctgcgacaagacccacacctgccccccctgccccgcccccgagctgctgggcggccccgacgtgttcctgttcccccccaagcccaaggacaccctgatgatctccaggacccccgaggtgacctgcgtggtggtggacgtgagtgacgaggaccccgaggtgaagttcaactggtacgtggacggcgtggaggtgcacaacgccaagaccaagcccagggaggagcagtacaactccacctacagggtggtgtccgtgctgaccgtgctgcaccaggactggctgaacggcaaggagtacaagtgcgccgtgtccaacaaggccctgcccgcccccatcgagaagaccatctccaaggccaagggccagcccagggagccccaggtgtacaccctgcccccctccagggacgagctgaccaagaaccaggtgtccctgacctgcctggtgaagggcttctacccctccgacatcgccgtggagtgggagtccaacggccagcccgagaacaactacaagaccaccccccccgtgctggactccgacggctccttcttcctgtactccaagctgaccgtggacaagtccaggtggcagcagggcaacgtgttctcctgctccgtgatgcacgaggccctgcacaaccactacacccagaagtccctgtccctgtcccccggcaag

SEQ ID NO: 271 - protein, 214 aa, Artificial Sequence; identical to SEQ ID NO: 179
  humanized HM268-K8-X3-K Light Chain PRT

SEQ ID NO: 272 - DNA, 642 bp, Artificial Sequence; identical to SEQ ID NO: 180
  humanized HM268-K8-X3-K Light Chain DNA

SEQ ID NO: 273 - protein, 447 aa, Artificial Sequence
  humanized HM268-K8-X3-KE Heavy Chain PRT
QVQLVQSGPEVKKPGASVKVVCKTSGYTFTSYYIQWLKQRPGQGLEWIGWIYFGDASTKYNEKFKGRVTMTADKSTSTAYMELRSLRSDDTAVYYCASYYGSYFDYWGQGTTVTVSSASTKGPSVFPLAPSSKSTSGGTAALGCLVKDYFPEPVTVSWNSGALTSGVHTFPAVLQSSGLYSLSSVVTVPSSSLGTQTYICNVNHKPSNTKVDKKVEPKSCDKTHTCPPCPAPELLGGPDVFLFPPKPKDTLMISRTPEVTCVVVDVSDEDPEVKFNWYVDGVEVHNAKTKPRAEQYNSTYRVVSVLTVLHQDWLNGKEYKCAVSNKALPAPIEKTISKAKGQPREPQVYTLPPSRDELTKNQVSLTCLVKGFYPSDIAVEWESNGQPENNYKTTPPVLDSDGSFFLYSKLTVDKSRWQQGNVFSCSVMHEALHNHYTQKSLSLSPGK

SEQ ID NO: 274 - DNA, 1341 bp, Artificial Sequence
  humanized HM268-K8-X3-KE Heavy Chain DNA
caggtgcagctggttcagtccgggcctgaggtgaagaagcccggcgctagtgtgaaggtcgtctgcaaaacttcaggctataccttcacatcctattacatccagtggctgaagcaacgccctggacaagggctcgaatggatcgggtggatctactttggggacgcttctaccaagtacaacgagaagtttaagggacgagtgacaatgaccgccgacaagtccacaagcaccgcctacatggagctcagatccctcaggagcgatgataccgcagtctactattgcgcctcttattacgggtcctacttcgactattggggtcagggaacaacggttacagtctcttccgcctccaccaaaggcccctctgtgtttccactggcaccaagctcaaagtcaaccagtggtggaaccgctgctctgggctgtctggttaaggactatttccccgaacctgtaaccgtaagctggaatagtggcgcactgacctccggggtccacacatttcccgccgtgctgcagagttcaggcctctattccctcagctccgtcgtgactgtcccctcctcttcccttggtactcagacttacatctgcaacgtgaaccacaagccctccaacaccaaggtggacaagaaggtcgagcccaagtcctgcgacaagacccacacctgccccccctgccccgcccccgagctgctgggcggccccgacgtgttcctgttcccccccaagcccaaggacaccctgatgatctccaggacccccgaggtgacctgcgtggtggtggacgtgagtgacgaggaccccgaggtgaagttcaactggtacgtggacggcgtggaggtgcacaacgccaagaccaagcccagggccgagcagtacaactccacctacagggtggtgtccgtgctgaccgtgctgcaccaggactggctgaacggcaaggagtacaagtgcgccgtgtccaacaaggccctgcccgcccccatcgagaagaccatctccaaggccaagggccagcccagggagccccaggtgtacaccctgcccccctccagggacgagctgaccaagaaccaggtgtccctgacctgcctggtgaagggcttctacccctccgacatcgccgtggagtgggagtccaacggccagcccgagaacaactacaagaccaccccccccgtgctggactccgacggctccttcttcctgtactccaagctgaccgtggacaagtccaggtggcagcagggcaacgtgttctcctgctccgtgatgcacgaggccctgcacaaccactacacccagaagtccctgtccctgtcccccggcaag

SEQ ID NO: 275 - protein, 214 aa, Artificial Sequence; identical to SEQ ID NO: 179
  humanized HM268-K8-X3-KE Light Chain PRT

SEQ ID NO: 276 - DNA, 642 bp, Artificial Sequence; identical to SEQ ID NO: 180
  humanized HM268-K8-X3-KE Light Chain DNA

SEQ ID NO: 277 - protein, 447 aa, Artificial Sequence
  humanized HM268-K8-X3-KI Heavy Chain PRT
QVQLVQSGPEVKKPGASVKVVCKTSGYTFTSYYIQWLKQRPGQGLEWIGWIYFGDASTKYNEKFKGRVTMTADKSTSTAYMELRSLRSDDTAVYYCASYYGSYFDYWGQGTTVTVSSASTKGPSVFPLAPSSKSTSGGTAALGCLVKDYFPEPVTVSWNSGALTSGVHTFPAVLQSSGLYSLSSVVTVPSSSLGTQTYICNVNHKPSNTKVDKKVEPKSCDKTHTCPPCPAPELLGGPDVFLFPPKPKDTLMISRTPEVTCVVVDVSDEDPEVKFNWYVDGVEVHNAKTKPREEQYNSTYRVVSVLTVLHQDWLNGKEYKCAVSNKALPAPEEKTISKAKGQPREPQVYTLPPSRDELTKNQVSLTCLVKGFYPSDIAVEWESNGQPENNYKTTPPVLDSDGSFFLYSKLTVDKSRWQQGNVFSCSVMHEALHNHYTQKSLSLSPGK

SEQ ID NO: 278 - DNA, 1341 bp, Artificial Sequence
  humanized HM268-K8-X3-KI Heavy Chain DNA
caggtgcagctggttcagtccgggcctgaggtgaagaagcccggcgctagtgtgaaggtcgtctgcaaaacttcaggctataccttcacatcctattacatccagtggctgaagcaacgccctggacaagggctcgaatggatcgggtggatctactttggggacgcttctaccaagtacaacgagaagtttaagggacgagtgacaatgaccgccgacaagtccacaagcaccgcctacatggagctcagatccctcaggagcgatgataccgcagtctactattgcgcctcttattacgggtcctacttcgactattggggtcagggaacaacggttacagtctcttccgcctccaccaaaggcccctctgtgtttccactggcaccaagctcaaagtcaaccagtggtggaaccgctgctctgggctgtctggttaaggactatttccccgaacctgtaaccgtaagctggaatagtggcgcactgacctccggggtccacacatttcccgccgtgctgcagagttcaggcctctattccctcagctccgtcgtgactgtcccctcctcttcccttggtactcagacttacatctgcaacgtgaaccacaagccctccaacaccaaggtggacaagaaggtcgagcccaagtcctgcgacaagacccacacctgccccccctgccccgcccccgagctgctgggcggccccgacgtgttcctgttcccccccaagcccaaggacaccctgatgatctccaggacccccgaggtgacctgcgtggtggtggacgtgtccgacgaggaccccgaggtgaagttcaactggtacgtggacggcgtggaggtgcacaacgccaagaccaagcccagggaggagcagtacaactccacctacagggtggtgtccgtgctgaccgtgctgcaccaggactggctgaacggcaaggagtacaagtgcgccgtgtccaacaaggccctgcccgcccccgaggagaagaccatctccaaggccaagggccagcccagggagccccaggtgtacaccctgcccccctccagggacgagctgaccaagaaccaggtgtccctgacctgcctggtgaagggcttctacccctccgacatcgccgtggagtgggagtccaacggccagcccgagaacaactacaagaccaccccccccgtgctggactccgacggctccttcttcctgtactccaagctgaccgtggacaagtccaggtggcagcagggcaacgtgttctcctgctccgtgatgcacgaggccctgcacaaccactacacccagaagtccctgtccctgtcccccggcaag

SEQ ID NO: 279 - protein, 214 aa, Artificial Sequence; identical to SEQ ID NO: 179
  humanized HM268-K8-X3-KI Light Chain PRT

SEQ ID NO: 280 - DNA, 642 bp, Artificial Sequence; identical to SEQ ID NO: 180
  humanized HM268-K8-X3-KI Light Chain DNA

SEQ ID NO: 281 - protein, 447 aa, Artificial Sequence
  humanized HM268-K8-X3-KL Heavy Chain PRT
QVQLVQSGPEVKKPGASVKVVCKTSGYTFTSYYIQWLKQRPGQGLEWIGWIYFGDASTKYNEKFKGRVTMTADKSTSTAYMELRSLRSDDTAVYYCASYYGSYFDYWGQGTTVTVSSASTKGPSVFPLAPSSKSTSGGTAALGCLVKDYFPEPVTVSWNSGALTSGVHTFPAVLQSSGLYSLSSVVTVPSSSLGTQTYICNVNHKPSNTKVDKKVEPKSCDKTHTCPPCPAPELLGGPDVFLFPPKPKDTLMISRTPEVTCVVVDVSDEDPEVKFNWYVDGVEVHNAKTKPREEQYNSTYRVVSVLTVLHQDWLNGKEYKCAVSNKAYPAPIEKTISKAKGQPREPQVYTLPPSRDELTKNQVSLTCLVKGFYPSDIAVEWESNGQPENNYKTTPPVLDSDGSFFLYSKLTVDKSRWQQGNVFSCSVMHEALHNHYTQKSLSLSPGK

SEQ ID NO: 282 - DNA, 1341 bp, Artificial Sequence
  humanized HM268-K8-X3-KL Heavy Chain DNA
caggtgcagctggttcagtccgggcctgaggtgaagaagcccggcgctagtgtgaaggtcgtctgcaaaacttcaggctataccttcacatcctattacatccagtggctgaagcaacgccctggacaagggctcgaatggatcgggtggatctactttggggacgcttctaccaagtacaacgagaagtttaagggacgagtgacaatgaccgccgacaagtccacaagcaccgcctacatggagctcagatccctcaggagcgatgataccgcagtctactattgcgcctcttattacgggtcctacttcgactattggggtcagggaacaacggttacagtctcttccgcctccaccaaaggcccctctgtgtttccactggcaccaagctcaaagtcaaccagtggtggaaccgctgctctgggctgtctggttaaggactatttccccgaacctgtaaccgtaagctggaatagtggcgcactgacctccggggtccacacatttcccgccgtgctgcagagttcaggcctctattccctcagctccgtcgtgactgtcccctcctcttcccttggtactcagacttacatctgcaacgtgaaccacaagccctccaacaccaaggtggacaagaaggtcgagcccaagtcctgcgacaagacccacacctgccccccctgccccgcccccgagctgctgggcggccccgacgtgttcctgttcccccccaagcccaaggacaccctgatgatctccaggacccccgaggtgacctgcgtggtggtggacgtgtccgacgaggaccccgaggtgaagttcaactggtacgtggacggcgtggaggtgcacaacgccaagaccaagcccagggaggagcagtacaactccacctacagggtggtgtccgtgctgaccgtgctgcaccaggactggctgaacggcaaggagtacaagtgcgccgtgtccaacaaggcctaccccgcccccatcgagaagaccatctccaaggccaagggccagcccagggagccccaggtgtacaccctgcccccctccagggacgagctgaccaagaaccaggtgtccctgacctgcctggtgaagggcttctacccctccgacatcgccgtggagtgggagtccaacggccagcccgagaacaactacaagaccaccccccccgtgctggactccgacggctccttcttcctgtactccaagctgaccgtggacaagtccaggtggcagcagggcaacgtgttctcctgctccgtgatgcacgaggccctgcacaaccactacacccagaagtccctgtccctgtcccccggcaag

SEQ ID NO: 283 - protein, 214 aa, Artificial Sequence; identical to SEQ ID NO: 179
  humanized HM268-K8-X3-KL Light Chain PRT

SEQ ID NO: 284 - DNA, 642 bp, Artificial Sequence; identical to SEQ ID NO: 180
  humanized HM268-K8-X3-KL Light Chain DNA

SEQ ID NO: 285 - protein, 447 aa, Artificial Sequence
  humanized HM268-K8-X3-KS Heavy Chain PRT
QVQLVQSGPEVKKPGASVKVVCKTSGYTFTSYYIQWLKQRPGQGLEWIGWIYFGDASTKYNEKFKGRVTMTADKSTSTAYMELRSLRSDDTAVYYCASYYGSYFDYWGQGTTVTVSSASTKGPSVFPLAPSSKSTSGGTAALGCLVKDYFPEPVTVSWNSGALTSGVHTFPAVLQSSGLYSLSSVVTVPSSSLGTQTYICNVNHKPSNTKVDKKVEPKSCDKTHTCPPCPAPELLGGPDVFLFPPKPKDTLMISRTPEVTCVVVDVGDEDPEVKFNWYVDGVEVHNAKTKPREEQYNSTYRVVSVLTVLHQDWLNGKEYKCAVSNKALPAPIEKTISKAKGQPREPQVYTLPPSRDELTKNQVSLTCLVKGFYPSDIAVEWESNGQPENNYKTTPPVLDSDGSFFLYSKLTVDKSRWQQGNVFSCSVMHEALHNHYTQKSLSLSPGK

SEQ ID NO: 286 - DNA, 1341 bp, Artificial Sequence
  humanized HM268-K8-X3-KS Heavy Chain DNA
caggtgcagctggttcagtccgggcctgaggtgaagaagcccggcgctagtgtgaaggtcgtctgcaaaacttcaggctataccttcacatcctattacatccagtggctgaagcaacgccctggacaagggctcgaatggatcgggtggatctactttggggacgcttctaccaagtacaacgagaagtttaagggacgagtgacaatgaccgccgacaagtccacaagcaccgcctacatggagctcagatccctcaggagcgatgataccgcagtctactattgcgcctcttattacgggtcctacttcgactattggggtcagggaacaacggttacagtctcttccgcctctactaaaggcccttctgtgtttcctctggctccatcctctaagtcaaccagcggcggtactgctgctcttggctgtctggtgaaagactacttccccgaaccagtgaccgtgagttggaacagtggcgcattgacaagcggagtacacacctttccagcagtgttgcagtccagcggcctgtatagcctttcctctgtggtgactgtgccctcaagtagcctgggaacgcagacatacatctgcaacgtgaaccacaagccctccaacaccaaggtggacaagaaggtcgagcccaagtcctgcgacaagacccacacctgccccccctgccccgcccccgagctgctgggcggccccgacgtgttcctgttcccccccaagcccaaggacaccctgatgatctccaggacccccgaggtgacctgcgtggtggtggacgtgggcgacgaggaccccgaggtgaagttcaactggtacgtggacggcgtggaggtgcacaacgccaagaccaagcccagggaggagcagtacaactccacctacagggtggtgtccgtgctgaccgtgctgcaccaggactggctgaacggcaaggagtacaagtgcgccgtgtccaacaaggccctgcccgcccccatcgagaagaccatctccaaggccaagggccagcccagggagccccaggtgtacaccctgcccccctccagggacgagctgaccaagaaccaggtgtccctgacctgcctggtgaagggcttctacccctccgacatcgccgtggagtgggagtccaacggccagcccgagaacaactacaagaccaccccccccgtgctggactccgacggctccttcttcctgtactccaagctgaccgtggacaagtccaggtggcagcagggcaacgtgttctcctgctccgtgatgcacgaggccctgcacaaccactacacccagaagtccctgtccctgtcccccggcaag

SEQ ID NO: 287 - protein, 214 aa, Artificial Sequence; identical to SEQ ID NO: 179
  humanized HM268-K8-X3-KS Light Chain PRT

SEQ ID NO: 288 - DNA, 642 bp, Artificial Sequence; identical to SEQ ID NO: 180
  humanized HM268-K8-X3-KS Light Chain DNA

SEQ ID NO: 289 - protein, 447 aa, Artificial Sequence
  humanized HM268-K8-X3-KSI Heavy Chain PRT
QVQLVQSGPEVKKPGASVKVVCKTSGYTFTSYYIQWLKQRPGQGLEWIGWIYFGDASTKYNEKFKGRVTMTADKSTSTAYMELRSLRSDDTAVYYCASYYGSYFDYWGQGTTVTVSSASTKGPSVFPLAPSSKSTSGGTAALGCLVKDYFPEPVTVSWNSGALTSGVHTFPAVLQSSGLYSLSSVVTVPSSSLGTQTYICNVNHKPSNTKVDKKVEPKSCDKTHTCPPCPAPELLGGPDVFLFPPKPKDTLMISRTPEVTCVVVDVGDEDPEVKFNWYVDGVEVHNAKTKPREEQYNSTYRVVSVLTVLHQDWLNGKEYKCAVSNKALPAPEEKTISKAKGQPREPQVYTLPPSRDELTKNQVSLTCLVKGFYPSDIAVEWESNGQPENNYKTTPPVLDSDGSFFLYSKLTVDKSRWQQGNVFSCSVMHEALHNHYTQKSLSLSPGK

SEQ ID NO: 290 - DNA, 1341 bp, Artificial Sequence
  humanized HM268-K8-X3-KSI Heavy Chain DNA
caggtgcagctggttcagtccgggcctgaggtgaagaagcccggcgctagtgtgaaggtcgtctgcaaaacttcaggctataccttcacatcctattacatccagtggctgaagcaacgccctggacaagggctcgaatggatcgggtggatctactttggggacgcttctaccaagtacaacgagaagtttaagggacgagtgacaatgaccgccgacaagtccacaagcaccgcctacatggagctcagatccctcaggagcgatgataccgcagtctactattgcgcctcttattacgggtcctacttcgactattggggtcagggaacaacggttacagtctcttccgcctccaccaaaggcccctctgtgtttccactggcaccaagctcaaagtcaaccagtggtggaaccgctgctctgggctgtctggttaaggactatttccccgaacctgtaaccgtaagctggaatagtggcgcactgacctccggggtccacacatttcccgccgtgctgcagagttcaggcctctattccctcagctccgtcgtgactgtcccctcctcttcccttggtactcagacttacatctgcaacgtgaaccacaagccctccaacaccaaggtggacaagaaggtcgagcccaagtcctgcgacaagacccacacctgccccccctgccccgcccccgagctgctgggcggccccgacgtgttcctgttcccccccaagcccaaggacaccctgatgatctccaggacccccgaggtgacctgcgtggtggtggacgtgggcgacgaggaccccgaggtgaagttcaactggtacgtggacggcgtggaggtgcacaacgccaagaccaagcccagggaggagcagtacaactccacctacagggtggtgtccgtgctgaccgtgctgcaccaggactggctgaacggcaaggagtacaagtgcgccgtgtccaacaaggccctgcccgcccccgaggagaagaccatctccaaggccaagggccagcccagggagccccaggtgtacaccctgcccccctccagggacgagctgaccaagaaccaggtgtccctgacctgcctggtgaagggcttctacccctccgacatcgccgtggagtgggagtccaacggccagcccgagaacaactacaagaccaccccccccgtgctggactccgacggctccttcttcctgtactccaagctgaccgtggacaagtccaggtggcagcagggcaacgtgttctcctgctccgtgatgcacgaggccctgcacaaccactacacccagaagtccctgtccctgtcccccggcaag

SEQ ID NO: 291 - protein, 214 aa, Artificial Sequence; identical to SEQ ID NO: 179
  humanized HM268-K8-X3-KSI Light Chain PRT

SEQ ID NO: 292 - DNA, 642 bp, Artificial Sequence; identical to SEQ ID NO: 180
  humanized HM268-K8-X3-KSI Light Chain DNA

SEQ ID NO: 293 - protein, 447 aa, Artificial Sequence
  humanized HM268-K8-X3-KSL Heavy Chain PRT
QVQLVQSGPEVKKPGASVKVVCKTSGYTFTSYYIQWLKQRPGQGLEWIGWIYFGDASTKYNEKFKGRVTMTADKSTSTAYMELRSLRSDDTAVYYCASYYGSYFDYWGQGTTVTVSSASTKGPSVFPLAPSSKSTSGGTAALGCLVKDYFPEPVTVSWNSGALTSGVHTFPAVLQSSGLYSLSSVVTVPSSSLGTQTYICNVNHKPSNTKVDKKVEPKSCDKTHTCPPCPAPELLGGPDVFLFPPKPKDTLMISRTPEVTCVVVDVGDEDPEVKFNWYVDGVEVHNAKTKPREEQYNSTYRVVSVLTVLHQDWLNGKEYKCAVSNKAYPAPIEKTISKAKGQPREPQVYTLPPSRDELTKNQVSLTCLVKGFYPSDIAVEWESNGQPENNYKTTPPVLDSDGSFFLYSKLTVDKSRWQQGNVFSCSVMHEALHNHYTQKSLSLSPGK

SEQ ID NO: 294 - DNA, 1341 bp, Artificial Sequence
  humanized HM268-K8-X3-KSL Heavy Chain DNA
caggtgcagctggttcagtccgggcctgaggtgaagaagcccggcgctagtgtgaaggtcgtctgcaaaacttcaggctataccttcacatcctattacatccagtggctgaagcaacgccctggacaagggctcgaatggatcgggtggatctactttggggacgcttctaccaagtacaacgagaagtttaagggacgagtgacaatgaccgccgacaagtccacaagcaccgcctacatggagctcagatccctcaggagcgatgataccgcagtctactattgcgcctcttattacgggtcctacttcgactattggggtcagggaacaacggttacagtctcttccgcctccaccaaaggcccctctgtgtttccactggcaccaagctcaaagtcaaccagtggtggaaccgctgctctgggctgtctggttaaggactatttccccgaacctgtaaccgtaagctggaatagtggcgcactgacctccggggtccacacatttcccgccgtgctgcagagttcaggcctctattccctcagctccgtcgtgactgtcccctcctcttcccttggtactcagacttacatctgcaacgtgaaccacaagccctccaacaccaaggtggacaagaaggtcgagcccaagtcctgcgacaagacccacacctgccccccctgccccgcccccgagctgctgggcggccccgacgtgttcctgttcccccccaagcccaaggacaccctgatgatctccaggacccccgaggtgacctgcgtggtggtggacgtgggcgacgaggaccccgaggtgaagttcaactggtacgtggacggcgtggaggtgcacaacgccaagaccaagcccagggaggagcagtacaactccacctacagggtggtgtccgtgctgaccgtgctgcaccaggactggctgaacggcaaggagtacaagtgcgccgtgtccaacaaggcctaccccgcccccatcgagaagaccatctccaaggccaagggccagcccagggagccccaggtgtacaccctgcccccctccagggacgagctgaccaagaaccaggtgtccctgacctgcctggtgaagggcttctacccctccgacatcgccgtggagtgggagtccaacggccagcccgagaacaactacaagaccaccccccccgtgctggactccgacggctccttcttcctgtactccaagctgaccgtggacaagtccaggtggcagcagggcaacgtgttctcctgctccgtgatgcacgaggccctgcacaaccactacacccagaagtccctgtccctgtcccccggcaag

SEQ ID NO: 295 - protein, 214 aa, Artificial Sequence; identical to SEQ ID NO: 179
  humanized HM268-K8-X3-KSL Light Chain PRT

SEQ ID NO: 296 - DNA, 642 bp, Artificial Sequence; identical to SEQ ID NO: 180
  humanized HM268-K8-X3-KSL Light Chain DNA

SEQ ID NO: 297 - protein, 447 aa, Artificial Sequence
  humanized HM268-K8-X4-K Heavy Chain PRT
QVQLVQSGPEVKKPGASVKVVCKTSGYTFTSYYIQWLKQRPGQGLEWIGWIYFGDASTKYNEKFKGRVTMTADKSTSTAYMELRSLRSDDTAVYYCASYYGSYFDYWGQGTTVTVSSASTKGPSVFPLAPSSKSTSGGTAALGCLVKDYFPEPVTVSWNSGALTSGVHTFPAVLQSSGLYSLSSVVTVPSSSLGTQTYICNVNHKPSNTKVDKKVEPKSCDKTHTCPPCPAPELLGGPDVFLFPPKPKDTLMISRTPEVTCVVVDVSDEDPEVKFNWYVDGVEVHNAKTKPREEQYNSTYRVVSVLTVLHQDWLNGKEYKCAVSNKAYPAPEEKTISKAKGQPREPQVYTLPPSRDELTKNQVSLTCLVKGFYPSDIAVEWESNGQPENNYKTTPPVLDSDGSFFLYSKLTVDKSRWQQGNVFSCSVMHEALHNHYTQKSLSLSPGK

SEQ ID NO: 298 - DNA, 1341 bp, Artificial Sequence
  humanized HM268-K8-X4-K Heavy Chain DNA
caggtgcagctggttcagtccgggcctgaggtgaagaagcccggcgctagtgtgaaggtcgtctgcaaaacttcaggctataccttcacatcctattacatccagtggctgaagcaacgccctggacaagggctcgaatggatcgggtggatctactttggggacgcttctaccaagtacaacgagaagtttaagggacgagtgacaatgaccgccgacaagtccacaagcaccgcctacatggagctcagatccctcaggagcgatgataccgcagtctactattgcgcctcttattacgggtcctacttcgactattggggtcagggaacaacggttacagtctcttccgcctctactaaaggcccttctgtgtttcctctggctccatcctctaagtcaaccagcggcggtactgctgctcttggctgtctggtgaaagactacttccccgaaccagtgaccgtgagttggaacagtggcgcattgacaagcggagtacacacctttccagcagtgttgcagtccagcggcctgtatagcctttcctctgtggtgactgtgccctcaagtagcctgggaacgcagacatacatctgcaacgtgaaccacaagccctccaacaccaaggtggacaagaaggtcgagcccaagtcctgcgacaagacccacacctgccccccctgccccgcccccgagctgctgggcggccccgacgtgttcctgttcccccccaagcccaaggacaccctgatgatctccaggacccccgaggtgacctgcgtggtggtggacgtgtccgacgaggaccccgaggtgaagttcaactggtacgtggacggcgtggaggtgcacaacgccaagaccaagcccagggaggagcagtacaactccacctacagggtggtgtccgtgctgaccgtgctgcaccaggactggctgaacggcaaggagtacaagtgcgccgtgtccaacaaggcctaccccgcccccgaggagaagaccatctccaaggccaagggccagcccagggagccccaggtgtacaccctgcccccctccagggacgagctgaccaagaaccaggtgtccctgacctgcctggtgaagggcttctacccctccgacatcgccgtggagtgggagtccaacggccagcccgagaacaactacaagaccaccccccccgtgctggactccgacggctccttcttcctgtactccaagctgaccgtggacaagtccaggtggcagcagggcaacgtgttctcctgctccgtgatgcacgaggccctgcacaaccactacacccagaagtccctgtccctgtcccccggcaag

SEQ ID NO: 299 - protein, 214 aa, Artificial Sequence; identical to SEQ ID NO: 179
  humanized HM268-K8-X4-K Light Chain PRT

SEQ ID NO: 300 - DNA, 642 bp, Artificial Sequence; identical to SEQ ID NO: 180
  humanized HM268-K8-X4-K Light Chain DNA

SEQ ID NO: 301 - protein, 447 aa, Artificial Sequence
  humanized HM268-K8-X4-KS Heavy Chain PRT
QVQLVQSGPEVKKPGASVKVVCKTSGYTFTSYYIQWLKQRPGQGLEWIGWIYFGDASTKYNEKFKGRVTMTADKSTSTAYMELRSLRSDDTAVYYCASYYGSYFDYWGQGTTVTVSSASTKGPSVFPLAPSSKSTSGGTAALGCLVKDYFPEPVTVSWNSGALTSGVHTFPAVLQSSGLYSLSSVVTVPSSSLGTQTYICNVNHKPSNTKVDKKVEPKSCDKTHTCPPCPAPELLGGPDVFLFPPKPKDTLMISRTPEVTCVVVDVGDEDPEVKFNWYVDGVEVHNAKTKPREEQYNSTYRVVSVLTVLHQDWLNGKEYKCAVSNKAYPAPEEKTISKAKGQPREPQVYTLPPSRDELTKNQVSLTCLVKGFYPSDIAVEWESNGQPENNYKTTPPVLDSDGSFFLYSKLTVDKSRWQQGNVFSCSVMHEALHNHYTQKSLSLSPGK

SEQ ID NO: 302 - DNA, 1341 bp, Artificial Sequence
  humanized HM268-K8-X4-KS Heavy Chain DNA
caggtgcagctggttcagtccgggcctgaggtgaagaagcccggcgctagtgtgaaggtcgtctgcaaaacttcaggctataccttcacatcctattacatccagtggctgaagcaacgccctggacaagggctcgaatggatcgggtggatctactttggggacgcttctaccaagtacaacgagaagtttaagggacgagtgacaatgaccgccgacaagtccacaagcaccgcctacatggagctcagatccctcaggagcgatgataccgcagtctactattgcgcctcttattacgggtcctacttcgactattggggtcagggaacaacggttacagtctcttccgcctccaccaaaggcccctctgtgtttccactggcaccaagctcaaagtcaaccagtggtggaaccgctgctctgggctgtctggttaaggactatttccccgaacctgtaaccgtaagctggaatagtggcgcactgacctccggggtccacacatttcccgccgtgctgcagagttcaggcctctattccctcagctccgtcgtgactgtcccctcctcttcccttggtactcagacttacatctgcaacgtgaaccacaagccctccaacaccaaggtggacaagaaggtcgagcccaagtcctgcgacaagacccacacctgccccccctgccccgcccccgagctgctgggcggccccgacgtgttcctgttcccccccaagcccaaggacaccctgatgatctccaggacccccgaggtgacctgcgtggtggtggacgtgggcgacgaggaccccgaggtgaagttcaactggtacgtggacggcgtggaggtgcacaacgccaagaccaagcccagggaggagcagtacaactccacctacagggtggtgtccgtgctgaccgtgctgcaccaggactggctgaacggcaaggagtacaagtgcgccgtgtccaacaaggcctaccccgcccccgaggagaagaccatctccaaggccaagggccagcccagggagccccaggtgtacaccctgcccccctccagggacgagctgaccaagaaccaggtgtccctgacctgcctggtgaagggcttctacccctccgacatcgccgtggagtgggagtccaacggccagcccgagaacaactacaagaccaccccccccgtgctggactccgacggctccttcttcctgtactccaagctgaccgtggacaagtccaggtggcagcagggcaacgtgttctcctgctccgtgatgcacgaggccctgcacaaccactacacccagaagtccctgtccctgtcccccggcaag

SEQ ID NO: 303 - protein, 214 aa, Artificial Sequence; identical to SEQ ID NO: 179
  humanized HM268-K8-X4-KS Light Chain PRT

SEQ ID NO: 304 - DNA, 642 bp, Artificial Sequence; identical to SEQ ID NO: 180
  humanized HM268-K8-X4-KS Light Chain DNA

SEQ ID NO: 305 - protein, 446 aa, Artificial Sequence
  humanized HM297-H5-X2-K Heavy Chain PRT
QVQLVQSGPEVKKPGASVKIPCKASGYTFTDYNVDWVRQVPGQGLEWMGDIDPNNGGTIYNQKFKDRVTMTVDKSTRTAYMELRSLRSDDTAVYYCARWRGAMDYWGQGTLVTVSSASTKGPSVFPLAPSSKSTSGGTAALGCLVKDYFPEPVTVSWNSGALTSGVHTFPAVLQSSGLYSLSSVVTVPSSSLGTQTYICNVNHKPSNTKVDKKVEPKSCDKTHTCPPCPAPELLDGPSVFLFPPKPKDTLMISRTPEVTCVVVDVSDEDPEVKFNWYVDGVEVHNAKTKPREEQYNSTYRVVSVLTVLHQDWLNGKEYKCAVSNKALPAPIEKTISKAKGQPREPQVYTLPPSRDELTKNQVSLTCLVKGFYPSDIAVEWESNGQPENNYKTTPPVLDSDGSFFLYSKLTVDKSRWQQGNVFSCSVMHEALHNHYTQKSLSLSPGK

SEQ ID NO: 306 - DNA, 1338 bp, Artificial Sequence
  humanized HM297-H5-X2-K Heavy Chain DNA
caggttcagctggtccaatccgggcccgaggttaagaagcccggagctagcgtcaagataccctgcaaagctagtggctataccttcacagactacaatgtagactgggttcggcaagtacccggtcagggcttggagtggatgggagatatcgaccccaataatggagggactatctacaaccagaaattcaaggatcgtgtcacaatgacggtggacaagagtacaaggaccgcctacatggagctgcgaagcttgcgctctgacgatacagccgtctactactgtgctaggtggagaggtgccatggactattggggccagggcaccctggtaaccgtgtcatctgcctctaccaaaggtcccagcgtgtttcctctcgccccatcaagcaagagcacatcaggtgggactgctgcactggggtgtttggtcaaggattacttccctgagccagtgacggtatcatggaactccggagcccttaccagcggagtgcatacttttcccgctgtgctgcaatcctccggcttgtatagcctttcttctgtggtcactgtgccttcttcctcactgggcacccagacctacatctgcaacgtgaaccacaagccctccaacaccaaggtggacaagaaggtcgagcccaagtcctgcgacaagacccacacctgccccccctgccccgcccccgagctgctggacggcccctccgtgttcctgttcccccccaagcccaaggacaccctgatgatctccaggacccccgaggtgacctgcgtggtggtggacgtgtccgacgaggaccccgaggtgaagttcaactggtacgtggacggcgtggaggtgcacaacgccaagaccaagcccagggaggagcagtacaactccacctacagggtggtgtccgtgctgaccgtgctgcaccaggactggctgaacggcaaggagtacaagtgcgccgtgtccaacaaggccctgcccgcccccatcgagaagaccatctccaaggccaagggccagcccagggagccccaggtgtacaccctgcccccctccagggacgagctgaccaagaaccaggtgtccctgacctgcctggtgaagggcttctacccctccgacatcgccgtggagtgggagtccaacggccagcccgagaacaactacaagaccaccccccccgtgctggactccgacggctccttcttcctgtactccaagctgaccgtggacaagtccaggtggcagcagggcaacgtgttctcctgctccgtgatgcacgaggccctgcacaaccactacacccagaagtccctgtccctgtcccccggcaag

SEQ ID NO: 307 - protein, 214 aa, Artificial Sequence; identical to SEQ ID NO: 183
  humanized HM297-H5-X2-K Light Chain PRT

SEQ ID NO: 308 - DNA, 642 bp, Artificial Sequence; identical to SEQ ID NO: 184
  humanized HM297-H5-X2-K Light Chain DNA

SEQ ID NO: 309 - protein, 446 aa, Artificial Sequence
  humanized HM297-H5-X3-KS Heavy Chain PRT
QVQLVQSGPEVKKPGASVKIPCKASGYTFTDYNVDWVRQVPGQGLEWMGDIDPNNGGTIYNQKFKDRVTMTVDKSTRTAYMELRSLRSDDTAVYYCARWRGAMDYWGQGTLVTVSSASTKGPSVFPLAPSSKSTSGGTAALGCLVKDYFPEPVTVSWNSGALTSGVHTFPAVLQSSGLYSLSSVVTVPSSSLGTQTYICNVNHKPSNTKVDKKVEPKSCDKTHTCPPCPAPELLGGPDVFLFPPKPKDTLMISRTPEVTCVVVDVGDEDPEVKFNWYVDGVEVHNAKTKPREEQYNSTYRVVSVLTVLHQDWLNGKEYKCAVSNKALPAPIEKTISKAKGQPREPQVYTLPPSRDELTKNQVSLTCLVKGFYPSDIAVEWESNGQPENNYKTTPPVLDSDGSFFLYSKLTVDKSRWQQGNVFSCSVMHEALHNHYTQKSLSLSPGK

SEQ ID NO: 310 - DNA, 1338 bp, Artificial Sequence
  humanized HM297-H5-X3-KS Heavy Chain DNA
caggttcagctggtccaatccgggcccgaggttaagaagcccggagctagcgtcaagataccctgcaaagctagtggctataccttcacagactacaatgtagactgggttcggcaagtacccggtcagggcttggagtggatgggagatatcgaccccaataatggagggactatctacaaccagaaattcaaggatcgtgtcacaatgacggtggacaagagtacaaggaccgcctacatggagctgcgaagcttgcgctctgacgatacagccgtctactactgtgctaggtggagaggtgccatggactattggggccagggcaccctggtaaccgtgtcatctgcctctaccaaaggtcccagcgtgtttcctctcgccccatcaagcaagagcacatcaggtgggactgctgcactggggtgtttggtcaaggattacttccctgagccagtgacggtatcatggaactccggagcccttaccagcggagtgcatacttttcccgctgtgctgcaatcctccggcttgtatagcctttcttctgtggtcactgtgccttcttcctcactgggcacccagacctacatctgcaacgtgaaccacaagccctccaacaccaaggtggacaagaaggtcgagcccaagtcctgcgacaagacccacacctgccccccctgccccgcccccgagctgctgggcggccccgacgtgttcctgttcccccccaagcccaaggacaccctgatgatctccaggacccccgaggtgacctgcgtggtggtggacgtgggcgacgaggaccccgaggtgaagttcaactggtacgtggacggcgtggaggtgcacaacgccaagaccaagcccagggaggagcagtacaactccacctacagggtggtgtccgtgctgaccgtgctgcaccaggactggctgaacggcaaggagtacaagtgcgccgtgtccaacaaggccctgcccgcccccatcgagaagaccatctccaaggccaagggccagcccagggagccccaggtgtacaccctgcccccctccagggacgagctgaccaagaaccaggtgtccctgacctgcctggtgaagggcttctacccctccgacatcgccgtggagtgggagtccaacggccagcccgagaacaactacaagaccaccccccccgtgctggactccgacggctccttcttcctgtactccaagctgaccgtggacaagtccaggtggcagcagggcaacgtgttctcctgctccgtgatgcacgaggccctgcacaaccactacacccagaagtccctgtccctgtcccccggcaag

SEQ ID NO: 311 - protein, 214 aa, Artificial Sequence; identical to SEQ ID NO: 183
  humanized HM297-H5-X3-KS Light Chain PRT

SEQ ID NO: 312 - DNA, 642 bp, Artificial Sequence; identical to SEQ ID NO: 184
  humanized HM297-H5-X3-KS Light Chain DNA

SEQ ID NO: 313 - protein, 446 aa, Artificial Sequence
  humanized HM297-H5-X4-K Heavy Chain PRT
QVQLVQSGPEVKKPGASVKIPCKASGYTFTDYNVDWVRQVPGQGLEWMGDIDPNNGGTIYNQKFKDRVTMTVDKSTRTAYMELRSLRSDDTAVYYCARWRGAMDYWGQGTLVTVSSASTKGPSVFPLAPSSKSTSGGTAALGCLVKDYFPEPVTVSWNSGALTSGVHTFPAVLQSSGLYSLSSVVTVPSSSLGTQTYICNVNHKPSNTKVDKKVEPKSCDKTHTCPPCPAPELLGGPDVFLFPPKPKDTLMISRTPEVTCVVVDVSDEDPEVKFNWYVDGVEVHNAKTKPREEQYNSTYRVVSVLTVLHQDWLNGKEYKCAVSNKAYPAPEEKTISKAKGQPREPQVYTLPPSRDELTKNQVSLTCLVKGFYPSDIAVEWESNGQPENNYKTTPPVLDSDGSFFLYSKLTVDKSRWQQGNVFSCSVMHEALHNHYTQKSLSLSPGK

SEQ ID NO: 314 - DNA, 1338 bp, Artificial Sequence
  humanized HM297-H5-X4-K Heavy Chain DNA
caggttcagctggtccaatccgggcccgaggttaagaagcccggagctagcgtcaagataccctgcaaagctagtggctataccttcacagactacaatgtagactgggttcggcaagtacccggtcagggcttggagtggatgggagatatcgaccccaataatggagggactatctacaaccagaaattcaaggatcgtgtcacaatgacggtggacaagagtacaaggaccgcctacatggagctgcgaagcttgcgctctgacgatacagccgtctactactgtgctaggtggagaggtgccatggactattggggccagggcaccctggtaaccgtgtcatctgcctctaccaaaggtcccagcgtgtttcctctcgccccatcaagcaagagcacatcaggtgggactgctgcactggggtgtttggtcaaggattacttccctgagccagtgacggtatcatggaactccggagcccttaccagcggagtgcatacttttcccgctgtgctgcaatcctccggcttgtatagcctttcttctgtggtcactgtgccttcttcctcactgggcacccagacctacatctgcaacgtgaaccacaagccctccaacaccaaggtggacaagaaggtcgagcccaagtcctgcgacaagacccacacctgccccccctgccccgcccccgagctgctgggcggccccgacgtgttcctgttcccccccaagcccaaggacaccctgatgatctccaggacccccgaggtgacctgcgtggtggtggacgtgtccgacgaggaccccgaggtgaagttcaactggtacgtggacggcgtggaggtgcacaacgccaagaccaagcccagggaggagcagtacaactccacctacagggtggtgtccgtgctgaccgtgctgcaccaggactggctgaacggcaaggagtacaagtgcgccgtgtccaacaaggcctaccccgcccccgaggagaagaccatctccaaggccaagggccagcccagggagccccaggtgtacaccctgcccccctccagggacgagctgaccaagaaccaggtgtccctgacctgcctggtgaagggcttctacccctccgacatcgccgtggagtgggagtccaacggccagcccgagaacaactacaagaccaccccccccgtgctggactccgacggctccttcttcctgtactccaagctgaccgtggacaagtccaggtggcagcagggcaacgtgttctcctgctccgtgatgcacgaggccctgcacaaccactacacccagaagtccctgtccctgtcccccggcaag

SEQ ID NO: 315 - protein, 214 aa, Artificial Sequence; identical to SEQ ID NO: 183
  humanized HM297-H5-X4-K Light Chain PRT

SEQ ID NO: 316 - DNA, 642 bp, Artificial Sequence; identical to SEQ ID NO: 184
  humanized HM297-H5-X4-K Light Chain DNA

SEQ ID NO: 317 - protein, 446 aa, Artificial Sequence
  humanized HM297-H5-X3-K Heavy Chain PRT
QVQLVQSGPEVKKPGASVKIPCKASGYTFTDYNVDWVRQVPGQGLEWMGDIDPNNGGTIYNQKFKDRVTMTVDKSTRTAYMELRSLRSDDTAVYYCARWRGAMDYWGQGTLVTVSSASTKGPSVFPLAPSSKSTSGGTAALGCLVKDYFPEPVTVSWNSGALTSGVHTFPAVLQSSGLYSLSSVVTVPSSSLGTQTYICNVNHKPSNTKVDKKVEPKSCDKTHTCPPCPAPELLGGPDVFLFPPKPKDTLMISRTPEVTCVVVDVSDEDPEVKFNWYVDGVEVHNAKTKPREEQYNSTYRVVSVLTVLHQDWLNGKEYKCAVSNKALPAPIEKTISKAKGQPREPQVYTLPPSRDELTKNQVSLTCLVKGFYPSDIAVEWESNGQPENNYKTTPPVLDSDGSFFLYSKLTVDKSRWQQGNVFSCSVMHEALHNHYTQKSLSLSPGK

SEQ ID NO: 318 - DNA, 1338 bp, Artificial Sequence
  humanized HM297-H5-X3-K Heavy Chain DNA
caggttcagctggtccaatccgggcccgaggttaagaagcccggagctagcgtcaagataccctgcaaagctagtggctataccttcacagactacaatgtagactgggttcggcaagtacccggtcagggcttggagtggatgggagatatcgaccccaataatggagggactatctacaaccagaaattcaaggatcgtgtcacaatgacggtggacaagagtacaaggaccgcctacatggagctgcgaagcttgcgctctgacgatacagccgtctactactgtgctaggtggagaggtgccatggactattggggccagggcaccctggtaaccgtgtcatctgcctccaccaaaggcccctctgtgtttccactggcaccaagctcaaagtcaaccagtggtggaaccgctgctctgggctgtctggttaaggactatttccccgaacctgtaaccgtaagctggaatagtggcgcactgacctccggggtccacacatttcccgccgtgctgcagagttcaggcctctattccctcagctccgtcgtgactgtcccctcctcttcccttggtactcagacttacatctgcaacgtgaaccacaagccctccaacaccaaggtggacaagaaggtcgagcccaagtcctgcgacaagacccacacctgccccccctgccccgcccccgagctgctgggcggccccgacgtgttcctgttcccccccaagcccaaggacaccctgatgatctccaggacccccgaggtgacctgcgtggtggtggacgtgagtgacgaggaccccgaggtgaagttcaactggtacgtggacggcgtggaggtgcacaacgccaagaccaagcccagggaggagcagtacaactccacctacagggtggtgtccgtgctgaccgtgctgcaccaggactggctgaacggcaaggagtacaagtgcgccgtgtccaacaaggccctgcccgcccccatcgagaagaccatctccaaggccaagggccagcccagggagccccaggtgtacaccctgcccccctccagggacgagctgaccaagaaccaggtgtccctgacctgcctggtgaagggcttctacccctccgacatcgccgtggagtgggagtccaacggccagcccgagaacaactacaagaccaccccccccgtgctggactccgacggctccttcttcctgtactccaagctgaccgtggacaagtccaggtggcagcagggcaacgtgttctcctgctccgtgatgcacgaggccctgcacaaccactacacccagaagtccctgtccctgtcccccggcaag

SEQ ID NO: 319 - protein, 214 aa, Artificial Sequence; identical to SEQ ID NO: 183
  humanized HM297-H5-X3-K Light Chain PRT

SEQ ID NO: 320 - DNA, 642 bp, Artificial Sequence; identical to SEQ ID NO: 184
  humanized HM297-H5-X3-K Light Chain DNA

SEQ ID NO: 321 - protein, 446 aa, Artificial Sequence
  humanized HM297-H5-X3-KSL Heavy Chain PRT
QVQLVQSGPEVKKPGASVKIPCKASGYTFTDYNVDWVRQVPGQGLEWMGDIDPNNGGTIYNQKFKDRVTMTVDKSTRTAYMELRSLRSDDTAVYYCARWRGAMDYWGQGTLVTVSSASTKGPSVFPLAPSSKSTSGGTAALGCLVKDYFPEPVTVSWNSGALTSGVHTFPAVLQSSGLYSLSSVVTVPSSSLGTQTYICNVNHKPSNTKVDKKVEPKSCDKTHTCPPCPAPELLGGPDVFLFPPKPKDTLMISRTPEVTCVVVDVGDEDPEVKFNWYVDGVEVHNAKTKPREEQYNSTYRVVSVLTVLHQDWLNGKEYKCAVSNKAYPAPIEKTISKAKGQPREPQVYTLPPSRDELTKNQVSLTCLVKGFYPSDIAVEWESNGQPENNYKTTPPVLDSDGSFFLYSKLTVDKSRWQQGNVFSCSVMHEALHNHYTQKSLSLSPGK

SEQ ID NO: 322 - DNA, 1338 bp, Artificial Sequence
  humanized HM297-H5-X3-KSL Heavy Chain DNA
caggttcagctggtccaatccgggcccgaggttaagaagcccggagctagcgtcaagataccctgcaaagctagtggctataccttcacagactacaatgtagactgggttcggcaagtacccggtcagggcttggagtggatgggagatatcgaccccaataatggagggactatctacaaccagaaattcaaggatcgtgtcacaatgacggtggacaagagtacaaggaccgcctacatggagctgcgaagcttgcgctctgacgatacagccgtctactactgtgctaggtggagaggtgccatggactattggggccagggcaccctggtaaccgtgtcatctgcctccaccaaaggcccctctgtgtttccactggcaccaagctcaaagtcaaccagtggtggaaccgctgctctgggctgtctggttaaggactatttccccgaacctgtaaccgtaagctggaatagtggcgcactgacctccggggtccacacatttcccgccgtgctgcagagttcaggcctctattccctcagctccgtcgtgactgtcccctcctcttcccttggtactcagacttacatctgcaacgtgaaccacaagccctccaacaccaaggtggacaagaaggtcgagcccaagtcctgcgacaagacccacacctgccccccctgccccgcccccgagctgctgggcggccccgacgtgttcctgttcccccccaagcccaaggacaccctgatgatctccaggacccccgaggtgacctgcgtggtggtggacgtgggcgacgaggaccccgaggtgaagttcaactggtacgtggacggcgtggaggtgcacaacgccaagaccaagcccagggaggagcagtacaactccacctacagggtggtgtccgtgctgaccgtgctgcaccaggactggctgaacggcaaggagtacaagtgcgccgtgtccaacaaggcctaccccgcccccatcgagaagaccatctccaaggccaagggccagcccagggagccccaggtgtacaccctgcccccctccagggacgagctgaccaagaaccaggtgtccctgacctgcctggtgaagggcttctacccctccgacatcgccgtggagtgggagtccaacggccagcccgagaacaactacaagaccaccccccccgtgctggactccgacggctccttcttcctgtactccaagctgaccgtggacaagtccaggtggcagcagggcaacgtgttctcctgctccgtgatgcacgaggccctgcacaaccactacacccagaagtccctgtccctgtcccccggcaag

SEQ ID NO: 323 - protein, 214 aa, Artificial Sequence; identical to SEQ ID NO: 183
  humanized HM297-H5-X3-KSL Light Chain PRT

SEQ ID NO: 324 - DNA, 642 bp, Artificial Sequence; identical to SEQ ID NO: 184
  humanized HM297-H5-X3-KSL Light Chain DNA

SEQ ID NO: 325 - protein, 446 aa, Artificial Sequence
  humanized HM297-H5-X3-KSI Heavy Chain PRT
QVQLVQSGPEVKKPGASVKIPCKASGYTFTDYNVDWVRQVPGQGLEWMGDIDPNNGGTIYNQKFKDRVTMTVDKSTRTAYMELRSLRSDDTAVYYCARWRGAMDYWGQGTLVTVSSASTKGPSVFPLAPSSKSTSGGTAALGCLVKDYFPEPVTVSWNSGALTSGVHTFPAVLQSSGLYSLSSVVTVPSSSLGTQTYICNVNHKPSNTKVDKKVEPKSCDKTHTCPPCPAPELLGGPDVFLFPPKPKDTLMISRTPEVTCVVVDVGDEDPEVKFNWYVDGVEVHNAKTKPREEQYNSTYRVVSVLTVLHQDWLNGKEYKCAVSNKALPAPEEKTISKAKGQPREPQVYTLPPSRDELTKNQVSLTCLVKGFYPSDIAVEWESNGQPENNYKTTPPVLDSDGSFFLYSKLTVDKSRWQQGNVFSCSVMHEALHNHYTQKSLSLSPGK

SEQ ID NO: 326 - DNA, 1338 bp, Artificial Sequence
  humanized HM297-H5-X3-KSI Heavy Chain DNA
caggttcagctggtccaatccgggcccgaggttaagaagcccggagctagcgtcaagataccctgcaaagctagtggctataccttcacagactacaatgtagactgggttcggcaagtacccggtcagggcttggagtggatgggagatatcgaccccaataatggagggactatctacaaccagaaattcaaggatcgtgtcacaatgacggtggacaagagtacaaggaccgcctacatggagctgcgaagcttgcgctctgacgatacagccgtctactactgtgctaggtggagaggtgccatggactattggggccagggcaccctggtaaccgtgtcatctgcctccaccaaaggcccctctgtgtttccactggcaccaagctcaaagtcaaccagtggtggaaccgctgctctgggctgtctggttaaggactatttccccgaacctgtaaccgtaagctggaatagtggcgcactgacctccggggtccacacatttcccgccgtgctgcagagttcaggcctctattccctcagctccgtcgtgactgtcccctcctcttcccttggtactcagacttacatctgcaacgtgaaccacaagccctccaacaccaaggtggacaagaaggtcgagcccaagtcctgcgacaagacccacacctgccccccctgccccgcccccgagctgctgggcggccccgacgtgttcctgttcccccccaagcccaaggacaccctgatgatctccaggacccccgaggtgacctgcgtggtggtggacgtgggcgacgaggaccccgaggtgaagttcaactggtacgtggacggcgtggaggtgcacaacgccaagaccaagcccagggaggagcagtacaactccacctacagggtggtgtccgtgctgaccgtgctgcaccaggactggctgaacggcaaggagtacaagtgcgccgtgtccaacaaggccctgcccgcccccgaggagaagaccatctccaaggccaagggccagcccagggagccccaggtgtacaccctgcccccctccagggacgagctgaccaagaaccaggtgtccctgacctgcctggtgaagggcttctacccctccgacatcgccgtggagtgggagtccaacggccagcccgagaacaactacaagaccaccccccccgtgctggactccgacggctccttcttcctgtactccaagctgaccgtggacaagtccaggtggcagcagggcaacgtgttctcctgctccgtgatgcacgaggccctgcacaaccactacacccagaagtccctgtccctgtcccccggcaag

SEQ ID NO: 327 - protein, 214 aa, Artificial Sequence; identical to SEQ ID NO: 183
  humanized HM297-H5-X3-KSI Light Chain PRT

SEQ ID NO: 328 - DNA, 642 bp, Artificial Sequence; identical to SEQ ID NO: 184
  humanized HM297-H5-X3-KSI Light Chain DNA

SEQ ID NO: 329 - protein, 446 aa, Artificial Sequence
  humanized HM297-H5-X3-KL Heavy Chain PRT
QVQLVQSGPEVKKPGASVKIPCKASGYTFTDYNVDWVRQVPGQGLEWMGDIDPNNGGTIYNQKFKDRVTMTVDKSTRTAYMELRSLRSDDTAVYYCARWRGAMDYWGQGTLVTVSSASTKGPSVFPLAPSSKSTSGGTAALGCLVKDYFPEPVTVSWNSGALTSGVHTFPAVLQSSGLYSLSSVVTVPSSSLGTQTYICNVNHKPSNTKVDKKVEPKSCDKTHTCPPCPAPELLGGPDVFLFPPKPKDTLMISRTPEVTCVVVDVSDEDPEVKFNWYVDGVEVHNAKTKPREEQYNSTYRVVSVLTVLHQDWLNGKEYKCAVSNKAYPAPIEKTISKAKGQPREPQVYTLPPSRDELTKNQVSLTCLVKGFYPSDIAVEWESNGQPENNYKTTPPVLDSDGSFFLYSKLTVDKSRWQQGNVFSCSVMHEALHNHYTQKSLSLSPGK

SEQ ID NO: 330 - DNA, 1338 bp, Artificial Sequence
  humanized HM297-H5-X3-KL Heavy Chain DNA
caggttcagctggtccaatccgggcccgaggttaagaagcccggagctagcgtcaagataccctgcaaagctagtggctataccttcacagactacaatgtagactgggttcggcaagtacccggtcagggcttggagtggatgggagatatcgaccccaataatggagggactatctacaaccagaaattcaaggatcgtgtcacaatgacggtggacaagagtacaaggaccgcctacatggagctgcgaagcttgcgctctgacgatacagccgtctactactgtgctaggtggagaggtgccatggactattggggccagggcaccctggtaaccgtgtcatctgcctccaccaaaggcccctctgtgtttccactggcaccaagctcaaagtcaaccagtggtggaaccgctgctctgggctgtctggttaaggactatttccccgaacctgtaaccgtaagctggaatagtggcgcactgacctccggggtccacacatttcccgccgtgctgcagagttcaggcctctattccctcagctccgtcgtgactgtcccctcctcttcccttggtactcagacttacatctgcaacgtgaaccacaagccctccaacaccaaggtggacaagaaggtcgagcccaagtcctgcgacaagacccacacctgccccccctgccccgcccccgagctgctgggcggccccgacgtgttcctgttcccccccaagcccaaggacaccctgatgatctccaggacccccgaggtgacctgcgtggtggtggacgtgtccgacgaggaccccgaggtgaagttcaactggtacgtggacggcgtggaggtgcacaacgccaagaccaagcccagggaggagcagtacaactccacctacagggtggtgtccgtgctgaccgtgctgcaccaggactggctgaacggcaaggagtacaagtgcgccgtgtccaacaaggcctaccccgcccccatcgagaagaccatctccaaggccaagggccagcccagggagccccaggtgtacaccctgcccccctccagggacgagctgaccaagaaccaggtgtccctgacctgcctggtgaagggcttctacccctccgacatcgccgtggagtgggagtccaacggccagcccgagaacaactacaagaccaccccccccgtgctggactccgacggctccttcttcctgtactccaagctgaccgtggacaagtccaggtggcagcagggcaacgtgttctcctgctccgtgatgcacgaggccctgcacaaccactacacccagaagtccctgtccctgtcccccggcaag

SEQ ID NO: 331 - protein, 214 aa, Artificial Sequence; identical to SEQ ID NO: 183
  humanized HM297-H5-X3-KL Light Chain PRT

SEQ ID NO: 332 - DNA, 642 bp, Artificial Sequence; identical to SEQ ID NO: 184
  humanized HM297-H5-X3-KL Light Chain DNA

SEQ ID NO: 333 - protein, 446 aa, Artificial Sequence
  humanized HM297-H5-X3-KI Heavy Chain PRT
QVQLVQSGPEVKKPGASVKIPCKASGYTFTDYNVDWVRQVPGQGLEWMGDIDPNNGGTIYNQKFKDRVTMTVDKSTRTAYMELRSLRSDDTAVYYCARWRGAMDYWGQGTLVTVSSASTKGPSVFPLAPSSKSTSGGTAALGCLVKDYFPEPVTVSWNSGALTSGVHTFPAVLQSSGLYSLSSVVTVPSSSLGTQTYICNVNHKPSNTKVDKKVEPKSCDKTHTCPPCPAPELLGGPDVFLFPPKPKDTLMISRTPEVTCVVVDVSDEDPEVKFNWYVDGVEVHNAKTKPREEQYNSTYRVVSVLTVLHQDWLNGKEYKCAVSNKALPAPEEKTISKAKGQPREPQVYTLPPSRDELTKNQVSLTCLVKGFYPSDIAVEWESNGQPENNYKTTPPVLDSDGSFFLYSKLTVDKSRWQQGNVFSCSVMHEALHNHYTQKSLSLSPGK

SEQ ID NO: 334 - DNA, 1338 bp, Artificial Sequence
  humanized HM297-H5-X3-KI Heavy Chain DNA
caggttcagctggtccaatccgggcccgaggttaagaagcccggagctagcgtcaagataccctgcaaagctagtggctataccttcacagactacaatgtagactgggttcggcaagtacccggtcagggcttggagtggatgggagatatcgaccccaataatggagggactatctacaaccagaaattcaaggatcgtgtcacaatgacggtggacaagagtacaaggaccgcctacatggagctgcgaagcttgcgctctgacgatacagccgtctactactgtgctaggtggagaggtgccatggactattggggccagggcaccctggtaaccgtgtcatctgcctccaccaaaggcccctctgtgtttccactggcaccaagctcaaagtcaaccagtggtggaaccgctgctctgggctgtctggttaaggactatttccccgaacctgtaaccgtaagctggaatagtggcgcactgacctccggggtccacacatttcccgccgtgctgcagagttcaggcctctattccctcagctccgtcgtgactgtcccctcctcttcccttggtactcagacttacatctgcaacgtgaaccacaagccctccaacaccaaggtggacaagaaggtcgagcccaagtcctgcgacaagacccacacctgccccccctgccccgcccccgagctgctgggcggccccgacgtgttcctgttcccccccaagcccaaggacaccctgatgatctccaggacccccgaggtgacctgcgtggtggtggacgtgtccgacgaggaccccgaggtgaagttcaactggtacgtggacggcgtggaggtgcacaacgccaagaccaagcccagggaggagcagtacaactccacctacagggtggtgtccgtgctgaccgtgctgcaccaggactggctgaacggcaaggagtacaagtgcgccgtgtccaacaaggccctgcccgcccccgaggagaagaccatctccaaggccaagggccagcccagggagccccaggtgtacaccctgcccccctccagggacgagctgaccaagaaccaggtgtccctgacctgcctggtgaagggcttctacccctccgacatcgccgtggagtgggagtccaacggccagcccgagaacaactacaagaccaccccccccgtgctggactccgacggctccttcttcctgtactccaagctgaccgtggacaagtccaggtggcagcagggcaacgtgttctcctgctccgtgatgcacgaggccctgcacaaccactacacccagaagtccctgtccctgtcccccggcaag

SEQ ID NO: 335 - protein, 214 aa, Artificial Sequence; identical to SEQ ID NO: 183
  humanized HM297-H5-X3-KI Light Chain PRT

SEQ ID NO: 336 - DNA, 642 bp, Artificial Sequence; identical to SEQ ID NO: 184
  humanized HM297-H5-X3-KI Light Chain DNA

SEQ ID NO: 337 - protein, 446 aa, Artificial Sequence
  humanized HM297-H5-X4-KS Heavy Chain PRT
QVQLVQSGPEVKKPGASVKIPCKASGYTFTDYNVDWVRQVPGQGLEWMGDIDPNNGGTIYNQKFKDRVTMTVDKSTRTAYMELRSLRSDDTAVYYCARWRGAMDYWGQGTLVTVSSASTKGPSVFPLAPSSKSTSGGTAALGCLVKDYFPEPVTVSWNSGALTSGVHTFPAVLQSSGLYSLSSVVTVPSSSLGTQTYICNVNHKPSNTKVDKKVEPKSCDKTHTCPPCPAPELLGGPDVFLFPPKPKDTLMISRTPEVTCVVVDVGDEDPEVKFNWYVDGVEVHNAKTKPREEQYNSTYRVVSVLTVLHQDWLNGKEYKCAVSNKAYPAPEEKTISKAKGQPREPQVYTLPPSRDELTKNQVSLTCLVKGFYPSDIAVEWESNGQPENNYKTTPPVLDSDGSFFLYSKLTVDKSRWQQGNVFSCSVMHEALHNHYTQKSLSLSPGK

SEQ ID NO: 338 - DNA, 1338 bp, Artificial Sequence
  humanized HM297-H5-X4-KS Heavy Chain DNA
caggttcagctggtccaatccgggcccgaggttaagaagcccggagctagcgtcaagataccctgcaaagctagtggctataccttcacagactacaatgtagactgggttcggcaagtacccggtcagggcttggagtggatgggagatatcgaccccaataatggagggactatctacaaccagaaattcaaggatcgtgtcacaatgacggtggacaagagtacaaggaccgcctacatggagctgcgaagcttgcgctctgacgatacagccgtctactactgtgctaggtggagaggtgccatggactattggggccagggcaccctggtaaccgtgtcatctgcctccaccaaaggcccctctgtgtttccactggcaccaagctcaaagtcaaccagtggtggaaccgctgctctgggctgtctggttaaggactatttccccgaacctgtaaccgtaagctggaatagtggcgcactgacctccggggtccacacatttcccgccgtgctgcagagttcaggcctctattccctcagctccgtcgtgactgtcccctcctcttcccttggtactcagacttacatctgcaacgtgaaccacaagccctccaacaccaaggtggacaagaaggtcgagcccaagtcctgcgacaagacccacacctgccccccctgccccgcccccgagctgctgggcggccccgacgtgttcctgttcccccccaagcccaaggacaccctgatgatctccaggacccccgaggtgacctgcgtggtggtggacgtgggcgacgaggaccccgaggtgaagttcaactggtacgtggacggcgtggaggtgcacaacgccaagaccaagcccagggaggagcagtacaactccacctacagggtggtgtccgtgctgaccgtgctgcaccaggactggctgaacggcaaggagtacaagtgcgccgtgtccaacaaggcctaccccgcccccgaggagaagaccatctccaaggccaagggccagcccagggagccccaggtgtacaccctgcccccctccagggacgagctgaccaagaaccaggtgtccctgacctgcctggtgaagggcttctacccctccgacatcgccgtggagtgggagtccaacggccagcccgagaacaactacaagaccaccccccccgtgctggactccgacggctccttcttcctgtactccaagctgaccgtggacaagtccaggtggcagcagggcaacgtgttctcctgctccgtgatgcacgaggccctgcacaaccactacacccagaagtccctgtccctgtcccccggcaag

SEQ ID NO: 339 - protein, 214 aa, Artificial Sequence; identical to SEQ ID NO: 183
  humanized HM297-H5-X4-KS Light Chain PRT

SEQ ID NO: 340 - DNA, 642 bp, Artificial Sequence; identical to SEQ ID NO: 184
  humanized HM297-H5-X4-KS Light Chain DNA

SEQ ID NO: 341 - protein, 446 aa, Artificial Sequence
  humanized HM297-H5-X3-KE Heavy Chain PRT
QVQLVQSGPEVKKPGASVKIPCKASGYTFTDYNVDWVRQVPGQGLEWMGDIDPNNGGTIYNQKFKDRVTMTVDKSTRTAYMELRSLRSDDTAVYYCARWRGAMDYWGQGTLVTVSSASTKGPSVFPLAPSSKSTSGGTAALGCLVKDYFPEPVTVSWNSGALTSGVHTFPAVLQSSGLYSLSSVVTVPSSSLGTQTYICNVNHKPSNTKVDKKVEPKSCDKTHTCPPCPAPELLGGPDVFLFPPKPKDTLMISRTPEVTCVVVDVSDEDPEVKFNWYVDGVEVHNAKTKPRAEQYNSTYRVVSVLTVLHQDWLNGKEYKCAVSNKALPAPIEKTISKAKGQPREPQVYTLPPSRDELTKNQVSLTCLVKGFYPSDIAVEWESNGQPENNYKTTPPVLDSDGSFFLYSKLTVDKSRWQQGNVFSCSVMHEALHNHYTQKSLSLSPGK

SEQ ID NO: 342 - DNA, 1338 bp, Artificial Sequence
  humanized HM297-H5-X3-KE Heavy Chain DNA
caggttcagctggtccaatccgggcccgaggttaagaagcccggagctagcgtcaagataccctgcaaagctagtggctataccttcacagactacaatgtagactgggttcggcaagtacccggtcagggcttggagtggatgggagatatcgaccccaataatggagggactatctacaaccagaaattcaaggatcgtgtcacaatgacggtggacaagagtacaaggaccgcctacatggagctgcgaagcttgcgctctgacgatacagccgtctactactgtgctaggtggagaggtgccatggactattggggccagggcaccctggtaaccgtgtcatctgcctccaccaaaggcccctctgtgtttccactggcaccaagctcaaagtcaaccagtggtggaaccgctgctctgggctgtctggttaaggactatttccccgaacctgtaaccgtaagctggaatagtggcgcactgacctccggggtccacacatttcccgccgtgctgcagagttcaggcctctattccctcagctccgtcgtgactgtcccctcctcttcccttggtactcagacttacatctgcaacgtgaaccacaagccctccaacaccaaggtggacaagaaggtcgagcccaagtcctgcgacaagacccacacctgccccccctgccccgcccccgagctgctgggcggccccgacgtgttcctgttcccccccaagcccaaggacaccctgatgatctccaggacccccgaggtgacctgcgtggtggtggacgtgagtgacgaggaccccgaggtgaagttcaactggtacgtggacggcgtggaggtgcacaacgccaagaccaagcccagggccgagcagtacaactccacctacagggtggtgtccgtgctgaccgtgctgcaccaggactggctgaacggcaaggagtacaagtgcgccgtgtccaacaaggccctgcccgcccccatcgagaagaccatctccaaggccaagggccagcccagggagccccaggtgtacaccctgcccccctccagggacgagctgaccaagaaccaggtgtccctgacctgcctggtgaagggcttctacccctccgacatcgccgtggagtgggagtccaacggccagcccgagaacaactacaagaccaccccccccgtgctggactccgacggctccttcttcctgtactccaagctgaccgtggacaagtccaggtggcagcagggcaacgtgttctcctgctccgtgatgcacgaggccctgcacaaccactacacccagaagtccctgtccctgtcccccggcaag

SEQ ID NO: 343 - protein, 214 aa, Artificial Sequence; identical to SEQ ID NO: 183
  humanized HM297-H5-X3-KE Light Chain PRT

SEQ ID NO: 344 - DNA, 642 bp, Artificial Sequence; identical to SEQ ID NO: 184
  humanized HM297-H5-X3-KE Light Chain DNA

SEQ ID NO: 345 - protein, 5 aa, Mus musculus
SYYIQ

SEQ ID NO: 346 - protein, 17 aa, Mus musculus
WIYPGDGTTKYNEKFKG

SEQ ID NO: 347 - protein, 8 aa, Mus musculus
YYGSYFDY

SEQ ID NO: 348 - protein, 11 aa, Mus musculus
RASQDISNYLN

SEQ ID NO: 349 - protein, 7 aa, Mus musculus
YTSKLHS

SEQ ID NO: 350 - protein, 9 aa, Mus musculus
QQSSTLPFT

SEQ ID NO: 351 - protein, 5 aa, Mus musculus
SYYIQ

SEQ ID NO: 352 - protein, 17 aa, Mus musculus
WIYPGDGSSKYNEKFKG

SEQ ID NO: 353 - protein, 8 aa, Mus musculus
YYGSSFDY

SEQ ID NO: 354 - protein, 11 aa, Mus musculus
RASQDISNYLN

SEQ ID NO: 355 - protein, 7 aa, Mus musculus
YSSRLHS

SEQ ID NO: 356 - protein, 9 aa, Mus musculus
QQGSTLPFT

SEQ ID NO: 357 - protein, 5 aa, Mus musculus
SYYIQ

SEQ ID NO: 358 - protein, 17 aa, Mus musculus
WIYFGDASTKYNEKFKG

SEQ ID NO: 359 - protein, 8 aa, Mus musculus
YYGSYFDY

SEQ ID NO: 360 - protein, 11 aa, Mus musculus
RASQDISNYLN

SEQ ID NO: 361 - protein, 7 aa, Mus musculus
STSRLHS

SEQ ID NO: 362 - protein, 9 aa, Mus musculus
QQGSTLPFT

SEQ ID NO: 363 - protein, 5 aa, Mus musculus
DYNVD

SEQ ID NO: 364 - protein, 17 aa, Mus musculus
DIDPNNGGTIYNQKFKD

SEQ ID NO: 365 - protein, 7 aa, Mus musculus
WRGAMDY

SEQ ID NO: 366 - protein, 11 aa, Mus musculus
RASQDIDNYLK

SEQ ID NO: 367 - protein, 7 aa, Mus musculus
DTSRLHS

SEQ ID NO: 368 - protein, 9 aa, Mus musculus
QQGYTLPWT

SEQ ID NO: 369 - protein, 7 aa, Mus musculus
GYTFTSY

SEQ ID NO: 370 - protein, 6 aa, Mus musculus
YPGDGT

SEQ ID NO: 371 - protein, 8 aa, Mus musculus
YYGSYFDY

SEQ ID NO: 372 - protein, 11 aa, Mus musculus
RASQDISNYLN

SEQ ID NO: 373 - protein, 7 aa, Mus musculus
YTSKLHS

SEQ ID NO: 374 - protein, 9 aa, Mus musculus
QQSSTLPFT

SEQ ID NO: 375 - protein, 7 aa, Mus musculus
GYTFTSY

SEQ ID NO: 376 - protein, 6 aa, Mus musculus
YPGDGS

SEQ ID NO: 377 - protein, 8 aa, Mus musculus
YYGSSFDY

SEQ ID NO: 378 - protein, 11 aa, Mus musculus
RASQDISNYLN

SEQ ID NO: 379 - protein, 7 aa, Mus musculus
YSSRLHS

SEQ ID NO: 380 - protein, 9 aa, Mus musculus
QQGSTLPFT

SEQ ID NO: 381 - protein, 7 aa, Mus musculus
GYTFTSY

SEQ ID NO: 382 - protein, 6 aa, Mus musculus
YFGDAS

SEQ ID NO: 383 - protein, 8 aa, Mus musculus
YYGSYFDY

SEQ ID NO: 384 - protein, 11 aa, Mus musculus
RASQDISNYLN

SEQ ID NO: 385 - protein, 7 aa, Mus musculus
STSRLHS

SEQ ID NO: 386 - protein, 9 aa, Mus musculus
QQGSTLPFT

SEQ ID NO: 387 - protein, 7 aa, Mus musculus
GYTFTDY

SEQ ID NO: 388 - protein, 6 aa, Mus musculus
DPNNGG

SEQ ID NO: 389 - protein, 7 aa, Mus musculus
WRGAMDY

SEQ ID NO: 390 - protein, 11 aa, Mus musculus
RASQDIDNYLK

SEQ ID NO: 391 - protein, 7 aa, Mus musculus
DTSRLHS

SEQ ID NO: 392 - protein, 9 aa, Mus musculus
QQGYTLPWT

SEQ ID NO: 393 - protein, 8 aa, Mus musculus
GYTFTSYY

SEQ ID NO: 394 - protein, 8 aa, Mus musculus
IYPGDGTT

SEQ ID NO: 395 - protein, 10 aa, Mus musculus
ASYYGSYFDY

SEQ ID NO: 396 - protein, 6 aa, Mus musculus
QDISNY

SEQ ID NO: 397 - protein, 3 aa, Mus musculus
YTS

SEQ ID NO: 398 - protein, 9 aa, Mus musculus
QQSSTLPFT

SEQ ID NO: 399 - protein, 8 aa, Mus musculus
GYTFTSYY

SEQ ID NO: 400 - protein, 8 aa, Mus musculus
IYPGDGSS

SEQ ID NO: 401 - protein, 10 aa, Mus musculus
ASYYGSSFDY

SEQ ID NO: 402 - protein, 6 aa, Mus musculus
QDISNY

SEQ ID NO: 403 - protein, 3 aa, Mus musculus
YSS

SEQ ID NO: 404 - protein, 9 aa, Mus musculus
QQGSTLPFT

SEQ ID NO: 405 - protein, 8 aa, Mus musculus
GYTFTSYY

SEQ ID NO: 406 - protein, 8 aa, Mus musculus
IYFGDAST

SEQ ID NO: 407 - protein, 10 aa, Mus musculus
ASYYGSYFDY

SEQ ID NO: 408 - protein, 6 aa, Mus musculus
QDISNY

SEQ ID NO: 409 - protein, 3 aa, Mus musculus
STS

SEQ ID NO: 410 - protein, 9 aa, Mus musculus
QQGSTLPFT

SEQ ID NO: 411 - protein, 8 aa, Mus musculus
GYTFTDYN

SEQ ID NO: 412 - protein, 8 aa, Mus musculus
IDPNNGGT

SEQ ID NO: 413 - protein, 9 aa, Mus musculus
ARWRGAMDY

SEQ ID NO: 414 - protein, 6 aa, Mus musculus
QDIDNY

SEQ ID NO: 415 - protein, 3 aa, Mus musculus
DTS

SEQ ID NO: 416 - protein, 9 aa, Mus musculus
QQGYTLPWT

SEQ ID NO: 417 - protein, 9 aa, Mus musculus
YTFTSYYIQ

SEQ ID NO: 418 - protein, 14 aa, Mus musculus
WIGWIYPGDGTTKY

SEQ ID NO: 419 - protein, 9 aa, Mus musculus
SYYGSYFDY

SEQ ID NO: 420 - protein, 6 aa, Mus musculus
QDISNY

SEQ ID NO: 421 - protein, 11 aa, Mus musculus
LLIYYTSKLHS

SEQ ID NO: 422 - protein, 8 aa, Mus musculus
QQSSTLPF

SEQ ID NO: 423 - protein, 9 aa, Mus musculus
YTFTSYYIQ

SEQ ID NO: 424 - protein, 14 aa, Mus musculus
WIGWIYPGDGSSKY

SEQ ID NO: 425 - protein, 9 aa, Mus musculus
SYYGSSFDY

SEQ ID NO: 426 - protein, 6 aa, Mus musculus
QDISNY

SEQ ID NO: 427 - protein, 11 aa, Mus musculus
FLIYYSSRLHS

SEQ ID NO: 428 - protein, 8 aa, Mus musculus
QQGSTLPF

SEQ ID NO: 429 - protein, 9 aa, Mus musculus
YTFTSYYIQ

SEQ ID NO: 430 - protein, 14 aa, Mus musculus
WIGWIYFGDASTKY

SEQ ID NO: 431 - protein, 9 aa, Mus musculus
SYYGSYFDY

SEQ ID NO: 432 - protein, 6 aa, Mus musculus
QDISNY

SEQ ID NO: 433 - protein, 11 aa, Mus musculus
LLIYSTSRLHS

SEQ ID NO: 434 - protein, 8 aa, Mus musculus
QQGSTLPF

SEQ ID NO: 435 - protein, 9 aa, Mus musculus
YTFTDYNVD

SEQ ID NO: 436 - protein, 14 aa, Mus musculus
WIGDIDPNNGGTIY

SEQ ID NO: 437 - protein, 8 aa, Mus musculus
RWRGAMDY

SEQ ID NO: 438 - protein, 6 aa, Mus musculus
QDIDNY

SEQ ID NO: 439 - protein, 11 aa, Mus musculus
LLIYDTSRLHS

SEQ ID NO: 440 - protein, 8 aa, Mus musculus
QQGYTLPW
